(19) United States
(12) Patent Application Publication
(10) Pub. No.: US 2026/0027161 A1
(43) Pub. Date: Jan. 29, 2026

(54) BACTERIAL STRAINS FOR TREATING DISEASE

(71) Applicant: MICROBA IP PTY LTD, Brisbane (AU)

(72) Inventors: Páraic Ó. CUÍV, Brisbane (AU); Lutz KRAUSE, AU (AU)

(21) Appl. No.: 18/709,255

(22) PCT Filed: Nov. 11, 2022
(86) PCT No.: PCT/AU2022/051354

§ 371 Date: May 10, 2024

(30) Foreign Application Priority Data
Nov. 11, 2021 (AU) 2021903624

(51) Int. Cl. A61K 35/74; A61P 1/06; C12N 1/20; C12R 1/01

(52) U.S. Cl. CPC A61K 35/74; A61P 1/06; C12N 1/205; C12R 2001/01

(57) ABSTRACT

Disclosed are therapeutic compositions comprising bacterial strains and methods for the treatment or prevention of disease. More particularly, the present invention also discloses compositions comprising bacterial strains isolated from the human digestive tract and their use in the treatment or prevention of inflammatory and autoimmune disorders.

### FIELD OF THE INVENTION

[0001] This invention relates generally to the field of therapeutic compositions comprising bacterial strains and methods for the treatment or prevention of disease. More particularly, the present invention relates to compositions comprising bacterial strains isolated from the human digestive tract and their use in the treatment or prevention of inflammatory and autoimmune disorders.

### BACKGROUND OF THE INVENTION

[0002] The human gut microbiota contains more than 500-1000 different phylotypes belonging to a few bacterial phylum, including Firmicutes, Bacteroidetes, Proteobacteria, Fusobacteria, and Verrucomicrobia. The two major phyla, the Bacteroidetes and the Firmicutes, generally represent over 90% of the gut microbiota (Arumugam et al., 2011). The successful symbiotic relationships arising from bacterial colonisation of the human gut have yielded a wide variety of metabolic, structural, protective and other beneficial functions. The gut bacteria are key regulators of digestion along the gastrointestinal (GI) tract; with commensal bacterial playing an important role in the extraction, synthesis, and absorption of many nutrients and metabolites, including bile acids, lipids, amino acids, vitamins, and short-chain fatty acids (SCFAs). More recently, the immunological importance of the gut microbiota and their products in regulating the development, homeostasis, and function of innate and adaptive immune cells have been recognised (Brestoff and Atris, 2013).

[0003] It is now increasingly recognised that the gut microbiome regulates host intestinal mucosal immunity and predisposition to inflammation (Geva-Zatorsky et al., 2017; Kabat et al., 2014), opening new avenues for novel therapeutic interventions.

[0004] Dramatic changes in microbiota composition have been documented in many inflammatory and autoimmune disorders, including inflammatory bowel disease (IBD). In recognition of the potential positive effect that certain bacterial strains may have on the animal gut, various strains have been proposed for use in the treatment of various diseases. Certain strains, including Lactobacillus and Bifidobacterium strains, have been proposed for use in treating various extraintestinal inflammatory and autoimmune disorders (see, Goldin & Gorbach, 2008; Azad et al., 2013). However, the precise effects of particular bacterial strains locally at the GI tract and systemically throughout the body are unresolved. As a result, the relationships between different diseases and different bacterial strains in the human GI tract are yet to be clearly elucidated.

[0005] IBD (including the two major disease subtypes Crohn's disease (CD) and ulcerative colitis (UC)) is characterised by episodic and disabling inflammation of the GI tract. In 2017, it is estimated that 6.8 million people globally suffered from IBD, with the highest prevalence in the United States and Europe (GBD 2017; Inflammatory Bowel Disease Collaborators, 2019). Up to 20% of patients are diagnosed before the age of 16 and paediatric-onset IBD (PIBD) is associated with a more complicated and aggressive disease with adverse impacts on growth and psychosocial development.

[0006] There is currently no cure for IBD, and long-term clinical management requires effective therapeutics with an excellent safety profile. However, existing treatments show a range of deficiencies and remission is generally short. Moreover, IBD therapeutics are ineffective where early onset coupled with more aggressive disease result in progressive bowel damage and need for surgery. There is an urgent need to develop more effective and safe therapies to improve patient quality of life, maintain remission over long periods, reduce surgery and curtail individual and public health costs.

[0007] Existing treatments for IBD are sub-optimal with strong adverse effects, low compliance (50% average non-adherence rates (see, Chan et al., 2017)) and high cost. Furthermore, there is no effective solution to maintaining extended periods of disease-free remission. Mesalmine, one of the most widely used first line therapies for mild to moderate flares of ulcerative colitis and for maintenance of remission, has response rates between 40%-70% and remission rates of 15%-20% (Karagozian & Burakoff, 2007).

[0008] There is a requirement in the art for new methods of treating inflammatory and autoimmune disorders. There is also a requirement for the potential effects of gut bacteria to be characterised so that new therapies using gut bacteria can be developed.

### SUMMARY OF THE INVENTION

[0009] The present invention is predicated in part on the inventors identifying that bacterial strains of Intestinicoccus colisanans enhance or improve gut barrier function. Based on this consideration, it is proposed that strains of I. colisanans are particularly suited to therapeutic applications for treating and preventing inflammatory and autoimmune disorders, as described hereinafter.

[0010] The inventors have developed new compositions comprising a viable bacterial strain of the species Intestinicoccus colisanans that can be used for treating and preventing inflammatory and autoimmune disorders.

[0011] Accordingly, in one aspect the invention provides a cell of the Intestinicoccus colisanans strain deposited under accession number V21/015887 or V21/015888, or a derivative thereof.

[0012] In some embodiments, the cell is at least partially isolated.

[0013] In another aspect, the invention provides a biologically pure culture of the Intestinicoccus colisanans strain deposited under accession number V21/015887 or V21/015888, or a derivative thereof.

[0014] In another aspect, the present invention provides a composition comprising the cell or culture as described above and elsewhere herein.

[0015] In yet another aspect, the present invention provides a composition comprising a bacterial strain with a 16S rRNA sequence that is at least about 97.5%, 98%, 98.5% 99%, 99.1%, 99.2%, 99.3%, 99.4%, 99.5%, 99.6%, 99.7%, 99.8%, or 99.9%, identical to SEQ ID NO: 1; or with a 16S rRNA sequence represented by SEQ ID NO: 1. In some embodiments, the bacterial strain comprises two or more copies of a 16S rRNA sequence in its genome (e.g., two copies, three copies, four copies, five copies, six copies, seven copies, eight copies).

[0016] In some embodiments, the composition further comprises a pharmaceutically acceptable excipient, diluent, or carrier.

[0017] In yet another aspect, the present invention provides a pharmaceutical composition comprising a bacterial strain with a 16S rRNA sequence that is at least about 97%, 98%, 99%, 99.5%, 99.6%, 99.7%, 99.8%, or 99.9% identical to the 16S rRNA sequence of a bacterial strain of the species Intestinicoccus colisanans, together with a pharmaceutically acceptable carrier, diluent, or excipient.

[0018] Typically, the bacterial strain is at least partially isolated.

[0019] In some embodiments, the bacterial strain is live. In some alternative embodiments, the bacterial strain is dead.

[0020] In some embodiments, the compositions further comprise a prebiotic.

[0021] In some embodiments, the composition is formulated in a dried form. Typically, the composition is dried using techniques selected from lyophilisation, spray drying, fluidized bed drying, vacuum drying, or a combination thereof.

[0022] In some embodiments, the composition is formulated for oral administration.

[0023] In some embodiments, the bacterial strain produces an agent that attenuates or impairs signal transducer and activator of transcription 3 (STAT3) signalling in a cell.

[0024] In some embodiments of this type, the agent is a small molecule, peptide, or nucleotide. Typically, the agent is released by the bacterial strain.

[0025] In some embodiments, the agent binds specifically to any one of STAT3, JAK2, TYK2, or IL-23.

[0026] In some embodiments, the I. colisanans metabolizes one or more agents selected from the group comprising or consisting of starch, glucose, fructose, gluconate, lactose, trehalose, and lactaldehyde as a carbon source.

[0027] In another aspect, the present invention provides a method of restoring or improving gut barrier function in a subject, the method comprising administering to the subject a bacterial strain of the species I. colisanans, to thereby restore or improve gut barrier function.

[0028] In some preferred embodiments, restoring or improving gut barrier function is characterised by at least one of: (i) an increase in the quality and/or quantity of mucin; (ii) improvement in integrity of tight junction proteins; (iii) reduction in translocation of luminal contents into systemic circulation; or (iv) reduction of intestinal ulcers and/or intestinal wounds.

[0029] In some embodiments, the luminal contents includes lipopolysaccharide (LPS).

[0030] In some embodiments, the restoration or improvement in gut barrier function results in a reduction in systemic inflammation in the subject. In some embodiments of this type, the systemic inflammation is characterized by elevated levels of an inflammatory cytokine (e.g., IL-1P IL-8, IL-6, and TNF) in the subject as compared to the level of the inflammatory cytokine in a healthy subject.

[0031] In some embodiments, the I. colisanans bacterial strain stimulates PBMCs to produce the cytokines IL-10 and IL-12 at a ratio equal or greater than 5. For example, the I. colisanans bacterial strain may stimulate PBMCs to produce the cytokines IL-10 and IL-12 at a ratio equal or greater than 10, 15, 20, 25, or 30.

[0032] In yet another aspect, the present invention provides a method of maintaining gut barrier function in a subject, the method comprising administering to the subject a bacterial strain of the species I. colisanans, to thereby maintain gut barrier function in the subject.

[0033] In yet another aspect, the present invention provides a method of reducing inflammation in a subject, the method comprising administering to the subject a bacterial strain of the strain I. colisanans, to thereby reduce inflammation in the subject.

[0034] In some embodiments, the inflammation is local to the gut environment, or systemic inflammation.

[0035] In another aspect, the present invention provides a method of inducing or enhancing mucosal healing in a subject, the method comprising administering to the subject a bacterial strain of the species I. colisanans in an amount sufficient to induce epithelial cell migration, proliferation and/or differentiation, to thereby induce mucosal healing in the subject.

[0036] In some embodiments, mucosal healing in the subject can be measured using one or more fecal or serum markers. By way of an illustrative example, one or more fecal markers may be selected from the group comprising calprotectin, lactoferrin, metalloproteinase (MMP)-9, and lipocalin-2.

[0037] In some embodiments, the bacterial strain reduces inflammation by attenuating the NFκB pathway. In some embodiments of this type, the bacterial strain inhibits the production of one or more transcription factors, cytokines, or chemokines selected from the group comprising NFκB, TNF, IFN-γ, IL-1β, IL-8, and MCP-1.

[0038] In yet another aspect, the present invention provides methods of blocking or otherwise inhibiting STAT3 signalling in a target cell, the method comprising contacting the cell with at least a soluble component of a bacterial cell preparation of the species I. colisanans, to block or otherwise inhibit STAT3 signalling in the cell. Typically, the method of this aspect is performed in vitro.

[0039] In some embodiments, the target cell is selected from a reporter cell (e.g., a HEK cell), an immune cell (e.g., a Th17 immune cell), an epithelial cell, or an endothelial cell. In some embodiments, the target cell is a mammalian cell, and preferably, a human cell.

[0040] In some embodiments, the bacterial cell preparation is a bacterial cell culture. The soluble component may therefore comprise, consist, or consist essentially of, the soluble fraction of the bacterial cell culture (e.g., the cell culture supernatant). The soluble component may further comprise some insoluble components of the bacterial cell culture. For example, the soluble component may include substantially all of the bacterial culture. Preferably, the soluble component is substantially depleted of bacterial cells.

[0041] In some alternative embodiments, the bacterial cell preparation is a bacterial cell lysate. In exemplary embodiments of this type, the soluble component may relate to the soluble fraction of the cell lysate. A soluble fraction can suitably be achieved by any method, including by centrifugation.

[0042] In still yet another aspect, the present invention provides a method of blocking or otherwise inhibiting STAT3 signalling in a cell, the method comprising administering a bacterial strain of the species I. colisanans to the subject, thereby blocking or otherwise inhibiting STAT3 signalling in the cell. Typically, the methods of this aspect are performed in vivo.

[0043] In some embodiments, the cell is an immune cell (e.g., a Th17 immune cell) or epithelial cell.

[0044] In some embodiments, the cell is an epithelial cell, and the bacterial strain or a metabolite produced by the bacterial strain increases the production of IL-22 in the subject.

[0045] In some embodiments, the bacterial strain produces a molecule that is a direct inhibitor or an indirect inhibitor of STAT3. For example, the bacterial strain may produce a metabolite that directly inhibits at least one of an IL-23 polypeptide, a JAK2 polypeptide, a TYK2 polypeptide, or a STAT3 polypeptide.

[0046] In some embodiments, the bacterial strains used in the methods described above and elsewhere herein produces the metabolite acetate.

[0047] In some embodiments the bacterial strain has a 16S rRNA sequence that is at least about 97.5%, 98.5%, 99%, 99.1%, 99.2%, 99.3%, 99.4%, 99.5%, 99.6%, 99.7%, 99.8%, 99.9% identical to the 16S rRNA sequence of a bacterial strain of I. colisanans.

[0048] In some alternative embodiments, the bacterial strain has a 16S rRNA sequence that is at least about 97.5%, 98.5%, 99%, 99.1%, 99.2%, 99.3%, 99.4%, 99.5%, 99.6%, 99.7%, 99.8%, 99.9% identical to SEQ ID NO: 1 or when the bacterial strain has the 16S rRNA gene sequence represented by SEQ ID NO: 1. In some embodiments, the bacterial strain comprises two or more copies (e.g., two copies, three copies, four copies, five copies, six copies, seven copies, eight copies) independently selected from the 16S rRNA sequences set forth in SEQ ID NO: 1. In some alternative embodiments, the bacterial strain has a 16S rRNA sequence that is at least about 97.5%, 98.5%, 99%, 99.1%, 99.2%, 99.3%, 99.4%, 99.5%, 99.6%, 99.7%, 99.8%, 99.9% identical to SEQ ID NO: 2 or when the bacterial strain has the 16S rRNA gene sequence represented by SEQ ID NO: 2. In some embodiments, the bacterial strain comprises two or more copies (e.g., two copies, three copies, four copies, five copies, six copies, seven copies, eight copies) independently selected from the 16S rRNA sequences set forth in SEQ ID NO: 2.

[0049] In some embodiments, the bacterial strain is the I. colisanans strain deposited under accession number V21/015887 or V21/015888, or a derivative thereof.

[0050] Preferably, the bacterial strain is at least partially isolated.

[0051] In some embodiments, the bacterial strain is formulated as a pharmaceutical composition, further comprising a pharmaceutically acceptable carrier, diluent or excipient. In some embodiments, the pharmaceutical composition is a dry composition. In some embodiments, the dry composition is selected from the group consisting of particles, granules, and powder. By way of an illustrative example the pharmaceutical composition may be lyophilised, spray dried, fluidized bed dried, vacuum dried, or a combination thereof.

[0052] In some embodiments, the pharmaceutical composition is formulated for oral administration.

[0053] In still yet other aspects, the present invention provides a method of treating an inflammatory or autoimmune disorder in a subject, the method comprising administering an effective amount of a bacterial strain of I. colisanans to the subject, to thereby treat or prevent the inflammatory or autoimmune disorder.

[0054] In some embodiments, the inflammatory or autoimmune disorder is selected from the group comprising an inflammatory bowel disease (such as Crohn's disease or ulcerative colitis); asthma (such as allergic asthma or neutrophilic asthma); fatty liver disease (such as non-alcoholic fatty liver disease (NAFLD)); ankylosing spondylitis; systemic lupus erythematosus (SLE); scleroderma; Sjogren's syndrome; and vasculitis. Preferably, the inflammatory or autoimmune disorder is an inflammatory bowel disease (IBD).

[0055] In some embodiments, the bacterial strain blocks or otherwise inhibits STAT3 signalling in at least a cell of the subject. Typically, the cell is an epithelial cell, endothelial cell, or an immune cell (e.g., a Th17 immune cell).

[0056] In some embodiments, the bacterial strain has a 16S rRNA sequence that is at least about 98%, 98.5, 99%, 99.1%, 99.2%, 99.3%, 99.4%, 99.5%, 99.6%, 99.7%, 99.8%, or 99.9% identical to the 16S rRNA sequence of a bacterial strain of I. colisanans.

[0057] Alternatively, in some embodiments the bacterial strain has a 16S rRNA sequence that is at least about 98%, 98.5, 99%, 99.1%, 99.2%, 99.3%, 99.4%, 99.5%, 99.6%, 99.7%, 99.8%, or 99.9% identical to SEQ ID NO: 1, or when the bacterial strain has the 16S rRNA gene sequence represented by SEQ ID NO: 1. Alternatively, the bacterial strain may have a 16S rRNA sequence that is at least about 98%, 98.5, 99%, 99.1%, 99.2%, 99.3%, 99.4%, 99.5%, 99.6%, 99.7%, 99.8%, or 99.9% identical to SEQ ID NO: 2, or when the bacterial strain has the 16S rRNA gene sequence represented by SEQ ID NO: 2.

[0058] In some alternative embodiments, the bacterial strain may have a 16S rRNA sequence that is at least about 98%, 98.5, 99%, 99.1%, 99.2%, 99.3%, 99.4%, 99.5%, 99.6%, 99.7%, 99.8%, or 99.9% identical to any one of SEQ ID NOs: 7-10, or when the bacterial strain has the 16S rRNA gene sequence represented by any one of SEQ ID NOs: 7-10.

[0059] Preferably, the bacterial strain is at least partially isolated.

[0060] In some embodiments, the bacterial strain is formulated as a pharmaceutical composition, together with a pharmaceutically acceptable carrier, diluent, and/or excipient. In some embodiments, the composition is a dry composition selected from the group consisting of particles, granules, and powder. For example, the composition may be lyophilised. Alternatively, the composition may be spray dried, fluidized bed dried, or vacuum dried.

[0061] In some embodiments, the composition is formulated for oral administration.

[0062] In one aspect, the present invention provides a composition comprising a bacterial strain of the genus Intestinicoccus for use in therapy.

[0063] In another aspect, the present invention provides a composition comprising a bacterial strain of I. colisanans, for use in therapy. In some of the same embodiments and some other embodiments, the bacterial strain has a 16S rRNA sequence that is at least about 98%, 98.5, 99%, 99.1%, 99.2%, 99.3%, 99.4%, 99.5%, 99.6%, 99.7%, 99.8%, or 99.9% identical to the 16S rRNA sequence of a bacterial strain of I. colisanans.

[0064] Alternatively, the bacterial strain may have a 16S rRNA sequence that is at least about 98%, 98.5, 99%, 99.1%, 99.2%, 99.3%, 99.4%, 99.5%, 99.6%, 99.7%, 99.8%, or 99.9% identical to SEQ ID NO: 1, or when the bacterial strain has the 16S rRNA gene sequence represented by SEQ ID NO: 1.

[0065] Alternatively, the bacterial strain may have a 16S rRNA sequence that is at least about 98%, 98.5, 99%, 99.1%, 99.2%, 99.3%, 99.4%, 99.5%, 99.6%, 99.7%, 99.8%, or 99.9% identical to SEQ ID NO: 2, or when the bacterial strain has the 16S rRNA gene sequence represented by SEQ ID NO: 2.

[0066] Alternatively, the bacterial strain may have a 16S rRNA sequence that is at least about 98%, 98.5, 99%, 99.1%, 99.2%, 99.3%, 99.4%, 99.5%, 99.6%, 99.7%, 99.8%, or 99.9% identical to any one of SEQ ID NOs: 7-10, or when the bacterial strain has the 16S rRNA gene sequence represented by any one of SEQ ID NOs: 7-10.

[0067] In yet another aspect, the present invention provides a composition comprising a bacterial strain of the genus Intestinicoccus, for use in the treatment or prevention of an inflammatory or autoimmune disorder.

[0068] In still yet another aspect, the present invention provides a composition comprising a bacterial strain of I. colisanans, for use in the treatment or prevention of an inflammatory or autoimmune disorder.

[0069] In some embodiments, the bacterial strain is the I. colisanans strain, or a derivative thereof.

[0070] In some embodiments, the inflammatory or autoimmune disorder is selected from an inflammatory bowel disease (such as Crohn's disease or ulcerative colitis); asthma (such as allergic asthma or neutrophilic asthma); arthritis (such as rheumatoid arthritis, osteoarthritis, psoriatic arthritis, or juvenile idiopathic arthritis); fatty liver disease (such as nonalcoholic fatty liver disease (NAFLD)); ankylosing spondylitis; psoriasis; systemic lupus erythematosus (SLE); scleroderma; Sjogren's syndrome; and type 1 diabetes mellitus. In some preferred embodiments, the inflammatory or autoimmune disorder is an inflammatory bowel disease (IBD).

[0071] In one aspect, the present invention provides a composition for use in treating an inflammatory or autoimmune disorder, the composition comprising a bacterial strain of I. colisanans; and an ancillary treatment agent.

[0072] In some embodiments, the ancillary treatment agent is an anti-inflammatory agent. By way of an illustrative example, the anti-inflammatory agent is selected from the group comprising 5-aminosalicylates, corticosteroids, azathioprine, or a combination thereof. In some other embodiments, the ancillary treatment is an antibody (e.g., a monoclonal antibody). By way of an illustrative example, the antibody may be selected from infliximab, adalimumab, golimumab, certolizumab pegol, natalizumab, and vedolizumab.

[0073] In another aspect, the present invention provides a composition for use in treating an inflammatory or autoimmune disorder, the composition comprises a bacterial strain of I. colisanans; and a nutritional supplement. In embodiments of this type, the nutritional supplement improves engraftment of the bacterial stain.

[0074] In some related aspects, the technology described herein provides bacterial species and compositions comprising them in for form of probiotics. Preferably, such probiotics are effective to improve intestinal microbial ecology, alleviate symptoms of microbial dysbiosis, promote wellness, and/or treat or prevent inflammatory and/or autoimmune disorders.

### BRIEF DESCRIPTION OF THE FIGURES

[0075] The following figures form part of the present specification and are included to further demonstrate certain aspects of the present disclosure. The disclosure may be better understood by reference to one or more of these figures in combination with the detailed description of specific embodiments presented herein.

[0076] FIG. 1 provides graphical representations of the association between I. colisanans and representative inflammatory and/or autoimmune disorders. (A) Using high resolution gut metagenomic data of 6,020 subjects (MDD), we identified I. colisanans as being significantly less prevalent in a range of inflammatory and autoimmune disorders (striped bars) compared to healthy individuals (black bar) (P<0.05, Fisher's exact test). (B) The strongest reduction was observed for IBD, including both major subtypes Crohn's disease (CD) and ulcerative colitis (UC). These observations were validated in an independent IBD cohort previously published by Harvard (Franzosa et al., 2019).

[0077] FIG. 2 provides photographic and graphical representations of the morphology and phylogeny of I. colisanans. (A) Gram-staining I. colisanans isolate showing morphology. (B) A phylogenetic tree constructed with an alignment of 120 bacteria specific single copy marker genes from high quality reference genomes (GTDB r89). Nonparametric bootstrap values calculated from 1000 iterations. Intestinococcus was previously designated UBA1417.

[0078] FIG. 3 provides graphical representations that I. colisanans does not affect healthy gut function in naïve C57BI/6 mice. (A) Overview of the model used to assess the effect of I. colisanans on naïve C57Bl/6 mice. (B) Treatment with I. colisanans has little effect on body weight of naïve animals. (C)-(D) Treatment with I. colisanans has no effect on colon length or colon weight/length ratio relative to vehicle treated controls in naïve animals. (E)-(F) Treatment with I. colisanans has no effect on epithelial injury, inflammation, hypervascularization relative to vehicle treated controls in naïve animals. (G) Treatment with I. colisanans has no effect on gut histology relative to vehicle treated controls in naïve animals. All data reported as mean and standard deviation. ns, not significant.

[0079] FIG. 4 provides graphical representations that I. colisanans restores gut barrier function. (A) Overview of the DSS mouse model used to assess the therapeutic efficacy of I. colisanans. (B) Effect of daily treatment of vehicle, prednisone and I. colisanans in healthy and DSS treated mice. All treatment groups were compared to the DSS+vehicle group. Significance was determined using a two-way ANOVA with Tukey's test for multiple comparison. (C) Endoscopic assessment of colitis as assessed on days 1, 2 and 6. All groups were compared to the DSS+vehicle group for each individual day using a Kruskal-Wallis test with Dunn's correction for multiple comparisons (day 1) or one-way Anova with Dunnett's correction for multiple comparison (day 2, 6) as appropriate. All data presented as mean and standard deviation. (D) Representative gut histology images of C57Bl/6 mice treated with vehicle, prednisone, or I. colisanans. (E) DSS treatment results in an increase in the histopathological score that is ameliorated by treatment with prednisone, F. prausnitzii A2-165 and I. colisanans. All data presented as mean and standard deviation. All groups were compared to the DSS+vehicle group and significance was determined using a one-way ANOVA with Dunnett's test for multiple comparison. (F) DSS treatment results in an increase in epithelial injury that is ameliorated by treatment with prednisone and I. colisanans. All data presented as mean and standard deviation. All groups were compared to the DSS+vehicle group using a Kruskal-Wallis test with Dunn's correction for multiple comparisons. (G) Total histopathological scores of mice, (H) epithelial sub-score of total histopathological scores of all mice, (I) inflammation sub-score of total histopathological scores of all mice. All groups were compared against the DSS control group using ordinary One-way ANOVA with Dunnett's multiple comparisons test. D'Agostino-Pearson Omnibus tests were applied to all data to test for normal distribution, with all data passing this test. Brown-Forsyth tests were applied to all data to test for significant differences in group standard deviations, with all data passing this test. All groups are visually shown as points representing individual mice, with columns and error bars representing each group's mean and standard deviation. After correction for multiple comparisons, the following annotations for statistical significance are used; *, p<0.05; **, p<0.01; ***, p<0.001; ****, p<0.0001. (J) Disease activity index scores of healthy or DSS-treated mice administered I. colisanans MH27-2 at the indicated doses and formulations, or control drugs minocycline and prednisone. All groups treated with I. colisanans MH27-2 or control drugs were compared against DSS-vehicle controls using Brown-Forsythe and Welch ANOVA with Dunnett's T3 multiple comparisons tests. (K) Mouse body weights expressed as percentage of original body weights of healthy or DSS-treated mice administered I. colisanans MH27-2 at the indicated doses and formulations, or control drugs minocycline and prednisone. All groups treated with I. colisanans MH27-2 or control drugs were compared against DSS-vehicle controls using ordinary one-way ANOVA with Dunnett's multiple comparisons tests. (L) Fecal occult blood scores of healthy or DSS-treated mice administered I. colisanans MH27-2 at the indicated doses and formulations, or control drugs minocycline and prednisone. All groups treated with I. colisanans MH27-2 or control drugs were compared against DSS-vehicle controls using Brown-Forsythe and Welch ANOVA with Dunnett's multiple comparisons tests. (M-P) Histopathological total scores and sub-scores of healthy or DSS-treated mice administered I. colisanans MH27-2 at the indicated doses and formulations, or control drugs minocycline and prednisone. All groups treated with I. colisanans MH27-2 or control drugs were compared against DSS-vehicle controls using ordinary one-way ANOVA with Dunnett's multiple comparisons tests. All groups are visually shown as points representing individual mice, with columns and error bars representing each group's mean and standard deviation. For all statistical analyses, D'Agostino-Pearson omnibus tests were used to determine if data were normally distributed, with all data shown passing this test. Brown-Forsyth tests were used to determine if standard deviations were significantly different between groups, and if this test was significant, the Brown-Forsyth and Welch ANOVA tests were used instead of the ordinary one-way ANOVA. In this case, the Dunnett's T3 multiple comparisons test was used instead of the Dunnett's test. After correction for multiple comparisons, the following annotations for statistical significance are used: *, p<0.05; **, p<0.01; ***, p<0.001; ****, p<0.0001.

[0080] FIG. 5. (A) Overview of the SKG model used to assess the therapeutic efficacy of I. colisanans. (B) Curdlan treatment results in an increase in the histopathological score that is ameliorated by treatment with anti-IL-23 antibody and I. colisanans. All data presented as mean and standard deviation. All groups were compared to the curdlan+vehicle group using an ANOVA with Dunnett's test for multiple comparisons. (C) Curdlan treatment results in an increase in IL-6 and IL-12p70 that is ameliorated by treatment with I. colisanans. All data presented as mean and standard deviation. For IL-6, all groups were compared to the curdlan+vehicle group using an ordinary one-way ANOVA with Dunnett's test for multiple comparisons. For IL-12p70, all groups were compared to the DSS+vehicle group using a Kruskal-Wallis test with Dunn's correction for multiple comparisons. For IL-6, all groups were compared to the curdlan+vehicle group using an ordinary one-way ANOVA with Dunnett's test for multiple comparisons. For all data, ns: not significant; *, p<0.05; **, p<0.01; ***, p<0.001****, p<0.0001. (E) Overview of the TNBS model used to assess the therapeutic efficacy of I. colisanans MH27-2. (F) TNBS treatment results in an increase in the macroscopic damage histopathological score that is ameliorated by treatment with I. colisanans MH27-2 and cyclosporine A. The TNBS+vehicle group were compared to the I. colisanans MH27-2 and cyclosporine A treated groups using an Ordinary One-Way ANOVA test with Sidek's correction for multiple comparisons. (G) Treatment with I. colisanans MH27-2 results in significant improvements in the ulcers/inflammation scores. The TNBS+vehicle group were compared to the I. colisanans MH27-2 and cyclosporine A treated. (H) TNBS treatment results in an increase in the total histopathological score that is ameliorated by treatment with I. colisanans MH27-2 and cyclosporine A. The TNBS+vehicle group were compared to the I. colisanans MH27-2 and cyclosporine A treated groups using Brown-Forsythe and Welch ANOVA tests with Dunnett's T3 correction for multiple comparisons. (I-L) Treatment with I. colisanans MH27-2 results in significant improvements in the extent of inflammation, erosion or ulceration, epithelial regeneration and percent involvement scores. The TNBS+vehicle group were compared to the I. colisanans MH27-2 and cyclosporine A treated groups using the Kruskal-Wallis test with Dunn's multiple comparison test. (M) Treatment with I. colisanans MH27-2 results in significant reduction in IL-6 concentration. The TNBS+vehicle group was compared to the I. colisanans MH27-2 and cyclosporine A treated groups. The data was log transformed and analysed using a using the Kruskal-Wallis test with Dunn's multiple comparison test an Ordinary One-Way ANOVA test with Sidek's correction for multiple comparisons. (ns: not significant; *, p<0.05; **, p<0.01; ***, p<0.001; ****, p<0.0001).

[0081] FIG. 6 provides a graphical representation of I. colisanans MH27-1 and MH27-2 suppressing IL-6 mediated STAT3 activation in vitro. STAT3 signalling is inhibited when HEKBlue IL-6 reporter cells are treated with cell-free supernatant raw or <3KDa fractionated culture supernatant of (A) I. colisanans MH27-1 and (B) MH27-2 at 10% v/v (unpaired t-test, n=18), (C) MH27-3 (unpaired t-test, n=18), (D), MH27-4 v (unpaired t-test, n=18), (E) MH27-5 v (unpaired t-test, n=18) and (F) R. bromii MCB950 (unpaired t-test, n=12). STAT3 activation by IL-6 trans signalling is inhibited cell-free supernatant raw of I. colisanans MH27-2.

[0082] FIG. 7 provides a graphical representation showing that I. colisanans promote the migration of human gut epithelial cells. (A) Transwell migration assays were employed to study the effect of sterile culture supernatant extracts from I. colisanans on the migration of HCT116 colon cancer cells. In serum-starved conditions (0.5% FBS), the addition of I. colisanans 0.5× extract to the bottom of the chamber significantly increased the movement of HCT116 cells to the basolateral side compared to the medium extract control. (Untreated and medium control n=6 technical replicates; I. colisanans n=4 technical replicates, for 3 biological replicates each; Unpaired t-test, two-tailed P>0.0001). (B) As a second readout for cell migration, the Incucyte scratch wound assay was performed. The relative wound confluence was measured every two hours after the HCT116 cell monolayer was scratched. 24 hours post scratch, serum-starved HCT116 cells incubated in 0.3× extract from I. colisanans strains MH27-2 showed significantly higher wound confluence, compared to cells treated with medium extract. (One-way Anova with Dunnett's multiple comparisons test, *, p<0.05).

[0083] FIG. 8 provides graphical representation of MH27 suppressing IL-23-mediated activation of STAT3. STAT3 signalling is inhibited when HEK-Blue™ IL 23 reporter cell lines are treated with 25% cell-free supernatant or <3 kDa size fractionated I. colisanans but not R. bromii supernatant and similarly prepared YG/P medium. Samples were compared using an unpaired t-test (***, p<0.001; ns not significant). These data shown are the results of three independent experiments combined. Technical and biological replicates of raw and <3 kDa fractions were pooled together.

[0084] FIG. 9. After treatment with IFNγ (48 hour treatment (grey area)), culture supernatant from I. colisanans MH27-2 ameliorated the reduction in TEER relative to the YG/V medium control at 168, 192, 216, 240, 288, 312 and 336 hours (p<0.05 by two-way ANOVA test). (▴) untreated, (⋄) IFNγ+I. colisanans MH27-2 extract, (●) IFNγ+medium extract, (▪) IFNγ.

[0085] FIG. 10. Treatment with I. colisanans MH27-2 culture supernatant extract potentiates IL-6 (96-hour treatment (grey area)), mediated reduction in TEER relative to the medium control in a dose dependent manner. Statistical significance was determined by unpaired t test. (▴) untreated, (⋄) IL-6+I. colisanans MH27-2 extract, (●) IL-6+medium extract, (▪) IL-6.

[0086] FIG. 11 provides graphical representations showing re-treatment with I. colisanans MH27 extracts ameliorates IFNγ-induced reductions in ZO1 expression in T84 cells. (A) T84 cells were pre-treated with extracts of YG/V media control or I. colisanans MH27-1, MH27-2, or MH27-3 (1×) or left untreated for 18 h. The cells were then stimulated with recombinant IFNγ for 48 h, stained for ZO1 and imaged by confocal microscopy. Scale bars represent 10 μm. (B) Quantification of ZO1 relative brightness normalised to unstimulated cells revealing that pre-treatment with I. colisanans MH27 extracts significantly mitigates IFNγ induced reductions in ZO1 expression in T84 cells. Data are means±SD of one experiment and four replicates. One-way ANOVA with Dunnett's correction for multiple comparisons, *p<0.05, **p<0.01, ***p<0.001, ****p<0.0001.

[0087] FIG. 12 provides graphical representations to show that pre-treatment with I. colisanans MH27 fractions ameliorates IFNγ-induced reductions in ZO1 expression in T84 cells. Effect of fractionated (A) YG/V and (B) I. colisanans MH27-2 extracts on ZO1 expression. Scale bars represent 40 μm. (C) Quantification o^{f} ZO1 relative brightness normalised to unstimulated cells revealing that pre-treatment wi^{t}h 15- and 30% fractions of I. colisanans MH27-2 extracts significantly mitigates IFNγ induced reductions in ZO1 expression in T84 cells. Data are means±SD of one experiment and four replicates. One-way ANOVA with Dunnett's correction for multiple comparisons, ***p<0.001, ****p<0.0001.

[0088] FIG. 13 provides graphical representations to show I. colisanans MH27-produced metabolites ameliorate IFNγ-induced reductions in ZO1 expression in T84 cells. (A) T84 cells were pre-treated with ornithine, indole-3-acrylic acid (IAyA), or indole-3-proprionic acid (IPA) or left untreated for 18 h. The cells were then stimulated with recombinant IFNγ for 48 h, stained for ZO1 and imaged by confocal microscopy. Scale bars represent 10 μm. (B) Quantification of ZO1 relative brightness normalised to unstimulated cells revealing that pre-treatment with all investigated metabolites significantly mitigates IFNγ induced reductions in ZO1 expression in T84 cells. Data are means±SD of one experiment and four replicates. One-way ANOVA with Dunnett's correction for multiple comparisons, **p<0.01, ***p<0.001, ****p<0.0001. (C) Cyclo(-Phe-Pro) (CPP) suppresses IL-23 mediated activation of STAT3 relative to the vehicle control. Data are means±SD of three experiments. Data was analysed using an unpaired t-test. **p<0.0001.

[0089] FIG. 14. IL-10/IL-12 ratio of PBMCs stimulated with I. colisanans. Data are means and SD of a single experiment.

[0090] FIG. 15. NF-κB activation is suppressed when the LS174T-NF-κB cell line is treated with 25% cell-free or <3 kDa size fractionated I. colisanans supernatant as compared to similarly prepared medium (A-C) R. bromii MCB950 cell free supernatant does not suppresses NF-κB activation (D) Samples were compared using an unpaired t-test (*, p<0.05; **, p<0.01; ***, p<0.001; ****, p<0.0001 ns not significant). The data shown are the results of 3 independent experiments combined.

[0091] FIG. 16. Gating strategy of the CytoFLEX SRT Benchtop Cell Sorter used to isolate I. colisanans MH27-4 (A), MH27-5 (B), MH27-6 (C) and R. bromii MCB950 (D).

### BRIEF DESCRIPTION OF THE SEQUENCES

| SEQ | |
|---|---|
| ID NO: | Sequence Description |
| 1 | 16S rRNA sequence of I. colisanans strain MH27-1 |
| 2 | 16S rRNA sequence of I. colisanans strain MH27-2 |
| 3 | Genome sequence of I. colisanans strain MH27-1 (scaffold 1) |
| 4 | Genome sequence of I. colisanans strain MH27-1 (scaffold 2) |
| 5 | Genome sequence of I. colisanans strain MH27-2 (scaffold 1) |
| 6 | Genome sequence of I. colisanans strain MH27-2 (scaffold 2) |
| 7 | 16S rRNA sequence of I. colisanans strain MH27-3 |
| 8 | 16S rRNA sequence of I. colisanans strain MH27-4 |
| 9 | 16S rRNA sequence of I. colisanans strain MH27-5 |
| 10 | Partial 16S rRNA sequence of I. colisanans strain MH27-6 |
| 11 | Genome sequence of I. colisanans strain MH27-3 (scaffold 1) |
| 12 | Genome sequence of I. colisanans strain MH27-3 (scaffold 2) |
| 13 | Genome sequence of I. colisanans strain MH27-3 (scaffold 3) |
| 14 | Genome sequence of I. colisanans strain MH27-3 (scaffold 4) |
| 15 | Genome sequence of I. colisanans strain MH27-4 (scaffold 1) |
| 16 | Genome sequence of I. colisanans strain MH27-4 (scaffold 2) |
| 17 | Genome sequence of I. colisanans strain MH27-4 (scaffold 3) |
| 18 | Genome sequence of I. colisanans strain MH27-4 (scaffold 4) |
| 19 | Genome sequence of I. colisanans strain MH27-5 (scaffold 1) |
| 20 | Genome sequence of I. colisanans strain MH27-5 (scaffold 2) |
| 21 | Genome sequence of I. colisanans strain MH27-5 (scaffold 3) |
| 22 | Genome sequence of I. colisanans strain MH27-5 (scaffold 4) |

### DETAILED DESCRIPTION OF THE INVENTION

### 1. Definitions

[0092] Unless defined otherwise, all technical and scientific terms used herein have the same meaning as commonly understood by those of ordinary skill in the art to which the invention belongs. Although any methods and materials similar or equivalent to those described herein can be used in the practice or testing of the present invention, preferred methods and materials are described. For the purposes of the present invention, the following terms are defined below.

[0093] The articles “a” and “an” are used herein to refer to one or to more than one (i.e., to at least one) of the grammatical object of the article. By way of example, “an element” means one element or more than one element.

[0094] The term “about” as used herein refers to the usual error range for the respective value readily known to the skilled person in this technical field. Reference to “about” a value or parameter herein includes (and describes) embodiments that are directed to that value or parameter perse.

[0095] As used herein, the term “administering,” refers to the placement of an agent (e.g., bacteria) as disclosed herein into a subject by a method or route which results in at least partial delivery of the agent at the desired site. Compositions comprising the compounds disclosed herein can be administered by any appropriate route which results in an effective biological activity or therapeutic effect in the subject. In some embodiments, administration comprises physical human activity (e.g., an injection, act of ingestion, an act of application, and/or manipulation of a delivery device or machine). Such activity can be performed (e.g., by a medical professional and/or the subject being treated).

[0096] Specifically, as used herein “administer” and “administration” encompasses embodiments in which one person directs another to consume live bacteria, dead bacteria, spent mediums derived from bacteria, cell pellets of bacteria, purified metabolites produced by bacteria, purified proteins produced by bacteria, prebiotics, small molecules, or combinations thereof in a certain manner and/or for a certain purpose independently of or in variance to any instructions received from a second person. Non-limiting examples of embodiments include the situation in which one person directs another to consume live bacteria, dead bacteria, spent mediums derived from bacteria, cell pellets of bacteria, purified metabolites produced by bacteria, purified proteins produced by bacteria, prebiotics, small molecules, or combinations thereof in a certain manner and/or for a certain purpose include when a physician prescribes a course of conduct and/or treatment to a patient, when a parent commands a minor user (such as a child) to consume such a product, when a trainer advises a user (such as an athlete) to follow a particular course of conduct and/or treatment, or when a manufacturer, distributer, or marketer recommends conditions of use to an end user, for example through advertisements or labeling on packing or on other materials provided in association with the sale or marketing of a product. In some embodiments, the disclosed compositions can be administered orally, intravenously, intramuscularly, intrathecally, subcutaneously, sublingually, buccally, rectally, vaginally, by the ocular route, by the optic route, nasally, via inhalation, by nebulization, cutaneously, transdermally, or combinations thereof, and formulated for delivery with a pharmaceutically acceptable excipient, carrier or diluent. Of note, although the disclosed compositions encompass multiple formulations and modes of delivery for treatments to ameliorate dysbiosis and its sequelae, it should be noted that live biotherapeutic products such as probiotics are not typically administered intravenously, intramuscularly, or intraperitoneally. These modes of delivery would likely be reserved for small-molecule products of bacterial metabolism.

[0097] The terms “administration concurrently” or “administering concurrently” or “co-administering” and the like refer to the administration of a single composition containing two or more actives, or the administration of each active as separate compositions and/or delivered by separate routes either contemporaneously or simultaneously or sequentially within a short enough period of time that the effective result is equivalent to that obtained when all such actives are administered as a single composition. By “simultaneously” is meant that the active agents are administered at substantially the same time, and desirably together in the same formulation. By “contemporaneously” it is meant that the active agents are administered closely in time, e.g., one agent is administered within from about one minute to within about one day before or after another. Any contemporaneous time is useful. However, it will often be the case that when not administered simultaneously, the agents will be administered within about one minute to within about eight hours and suitably within less than about one to about four hours. When administered contemporaneously, the agents are suitably administered at the same site on the subject. The term “same site” includes the exact location, but can be within about 0.5 to about 15 centimeters, preferably from within about 0.5 to about 5 centimeters. The term “separately” as used herein means that the agents are administered at an interval, for example at an interval of about a day to several weeks or months. The active agents may be administered in either order. The term “sequentially” as used herein means that the agents are administered in sequence, for example at an interval or intervals of minutes, hours, days or weeks. If appropriate the active agents may be administered in a regular repeating cycle.

[0098] The term “agent” includes a compound that induces a desired pharmacological and/or physiological effect. The term also encompasses pharmaceutically acceptable and pharmacologically active ingredients of those compounds specifically mentioned herein including but not limited to salts, esters, amides, prodrugs, active metabolites, analogs and the like. When the above term is used, then it is to be understood that this includes the active agent per se as well as pharmaceutically acceptable, pharmacologically active salts, esters, amides, prodrugs, metabolites, analogs, etc. The term “agent” is not to be construed narrowly but extends to small molecules, proteinaceous molecules such as peptides, polypeptides and proteins as well as compositions comprising them and genetic molecules such as RNA, DNA and mimetics and chemical analogs thereof as well as cellular agents. The term “agent” includes a cell that is capable of producing and secreting a polypeptide referred to herein as well as a polynucleotide comprising a nucleotide sequence that encodes that polypeptide. Thus, the term “agent” extends to nucleic acid constructs including vectors such as viral or non-viral vectors, expression vectors and plasmids for expression in and secretion in a range of cells.

[0099] The “amount” or “level” of a biomarker is a detectable level in a sample. These can be measured by methods known to one skilled in the art and also disclosed herein. The expression level or amount of biomarker assessed can be used to determine the response to treatment.

[0100] As used herein, “and/or” refers to and encompasses any and all possible combinations of one or more of the associated listed items, as well as the lack of combinations when interpreted in the alternative (or).

[0101] The term “anaerobic” means not requiring oxygen for growth. Anaerobic bacterial strains comprise bacterial strains that are obligate anaerobes (i.e., those that are harmed by the presence of oxygen); aerotolerant anaerobes, (i.e., those that cannot use oxygen for growth, but tolerate its presence); and facultative anaerobes (i.e., those that can grow without oxygen, but can use oxygen if it is present).

[0102] “Anaerobic conditions” are defined as conditions under which the oxygen concentration in the fermentation medium is too low for the microorganism to use as a terminal electron acceptor. “Anaerobic conditions” can be further defined as conditions under which no or small amounts of oxygen are added to the medium at rates of <3 mmol/L/h, preferably <2.5 mmol/L/h, more preferably <2 mmol/L/h, and most preferably <1.5 mmol/L/h. “Anaerobic conditions” means in particular completely oxygen-free (=0 mmol/L/h oxygen) or with small amounts of oxygen added to the medium at rates of e.g., <0.5 to <1 mmol/L/h. “Anaerobic metabolism” refers to a biochemical process in which oxygen is not the final acceptor of electrons contained in NADH. Anaerobic metabolism can be divided into anaerobic respiration, in which compounds other than oxygen serve as the terminal electron acceptor, and substrate level phosphorylation, in which the electrons from NADH are utilized to generate a reduced product via a fermentative pathway.

[0103] The term “carbon source” generally refers to a substrate or compound suitable for sustaining microorganism growth. Carbon sources may be in various forms, including, but not limited to polymers, carbohydrates, alcohols, acids, aldehydes, ketones, amino acids, peptides, etc. For example, these may include monosaccharides (such as glucose, fructose, xylose), oligosaccharides (i.e., sucrose, lactose), polysaccharides (i.e., starch, cellulose, hemicellulose), lignocellulosic materials, fatty acids (i.e., succinate, lactate, acetate), glycerol, etc. or a mixture thereof. The carbon source may be a product of photosynthesis, such as glucose or cellulose.

[0104] Monosaccharides used as carbon sources may be the product of hydrolysis of polysaccharides, such as acid or enzymatic hydrolysates of cellulose, starch and pectin. The term “energy source” may be used here interchangeably with carbon source since in chemoorganotrophic metabolism the carbon source is used both as an electron donor during catabolism and as a carbon source during cell growth.

[0105] Throughout this specification, unless the context requires otherwise, the words “comprise”, “comprises” and “comprising” will be understood to imply the inclusion of a stated step or element or group of steps or elements but not the exclusion of any other step or element or group of steps or elements. Thus, use of the term “comprising” and the like indicates that the listed elements are required or mandatory, but that other elements are optional and may or may not be present. By “consisting of” is meant including, and limited to, whatever follows the phrase “consisting of”. Thus, the phrase “consisting of” indicates that the listed elements are required or mandatory, and that no other elements may be present. By “consisting essentially of” is meant including any elements listed after the phrase, and limited to other elements that do not interfere with or contribute to the activity or action specified in the disclosure for the listed elements. Thus, the phrase “consisting essentially of” indicates that the listed elements are required or mandatory, but that other elements are optional and may or may not be present depending upon whether or not they affect the activity or action of the listed elements.

[0106] As used herein, “culturing”, “culture” and the like refer to the set of procedures used in vitro where a population of cells (or a single cell) is incubated under conditions which have been shown to support the growth or maintenance of the cells in vitro. The art recognizes a wide number of formats, media, temperature ranges, gas concentrations etc. which need to be defined in a culture system. The parameters will vary based on the format selected and the specific needs of the individual who practices the methods herein disclosed. However, it is recognized that the determination of culture parameters is routine in nature.

[0107] The terms “decrease”, “reduced”, “reduction”, “inhibit”, “suppress”, “attenuate” and the like are all used herein to mean a decrease by a statistically significant amount. In some embodiments, these terms typically mean a decrease by at least 10% as compared to a reference level (e.g., the absence of a given treatment or agent) and can include, for example, a decrease by at least about 10%, at least about 20%, at least about 25%, at least about 30%, at least about 35%, at least about 40%, at least about 45%, at least about 50%, at least about 55%, at least about 60%, at least about 65%, at least about 70%, at least about 75%, at least about 80%, at least about 85%, at least about 90%, at least about 95%, at least about 98%, at least about 99%, or more. As used herein “reduction”, “suppression”, and “inhibition” does not necessitate a complete inhibition or reduction as compared to a reference level. “Complete inhibition” and the like is a 100% inhibition as compared to a reference level. A decrease can be preferably down to a level accepted as within the range of normal (e.g., for an individual without a given disorder).

[0108] The terms “increased”, “increase”, enhance”, or “activate” are all used herein to mean an increase by a statistically significant amount. In some embodiments, the terms “increased”, “increase”, “enhance”, or “activate” can mean an increase of at least 10% as compared to a reference level (e.g., the absence of a given treatment or agent) and can include, for example, of at least about 10% as compared to a reference level, for example an increase of at least about 20%, at least about 25%, at least about 30%, at least about 35%, at least about 40%, at least about 45%, at least about 50%, at least about 55%, at least about 60%, at least about 65%, at least about 70%, at least about 75%, at least about 80%, at least about 85%, at least about 90%, at least about 95%, at least about 98%, at least about 99%, or up to and including a 100% increase or any increase between 10-100% as compared to a reference level or at least about a 2-fold, or at least about a 3-fold, or at least about a 3-fold, or at least about a 4-fold, or at least about a 5-fold, or at least about a 10-fold increase, or any increase between 2-fold and 10-fold or greater as compared to a reference level. In the context of a marker or symptom, an “increase” is a statistically significant increase in such level.

[0109] As used herein, the term “isolated” encompasses a bacterium or other entity or substance that has been (1) separated from at least some of the components with which it was associated when initially produced (whether in nature, such as human stool, or in an experimental setting, such as a Petri plate consisting of artificial growth medium), and/or (2) produced, prepared, purified, and/or manufactured by the hand of man. Isolated bacterial, proteins, metabolites, or combinations thereof may be separated from at least about 10%, about 20%, about 30%, about 40%, about 50%, about 60%, about 70%, about 80%, about 90%, or more of the other components with which they were initially associated. In some embodiments, isolated bacteria, proteins, metabolites, or combinations thereof are more than about 80%, about 85%, about 90%, about 91%, about 92%, about 93%, about 94%, about 95%, about 96%, about 97%, about 98%, about 99% or more than about 99% pure. As used herein, a substance is “pure” if it is substantially free of other components (such as other bacterial species). The terms “purify”, “purifying”, and “purified” refer to a bacterium or other material that has been separated from at least some of the components with which it was associated either when initially produced or generated (e.g., when in nature or in an experimental setting), or during any time after its initial production, as recognized by those skilled in the art of bacterial cultivation or of relevant skill (e.g., chemistry). A bacterium or bacterial population can be considered purified if it is isolated at or after production, such as from a material or environment containing the bacterial or bacterial population, and a purified bacterium or bacterial population can contain other material up to about 10%, about 20%, about 30%, about 40%, about 50%, about 60%, about 70%, about 80%, about 90% or above about 90% and still be considered “isolated”. In some embodiments, purified bacterial and bacterial populations are more than about 80%, about 85%, about 90%, about 91%, about 92%, about 93%, about 94%, about 95%, about 96%, about 97%, about 98%, about 99% or more than about 99% pure. In the instance of bacterial compositions provided herein, the one or more bacterial types present in the composition can be independently purified from one or more other bacteria produced and/or present in the material or environment containing the bacterial type. In some embodiments, a bacterium or population of bacteria is “isolated” if it comprises a single strain of bacteria. In some embodiments, such isolated bacteria can be admixed or administered with other isolated bacteria (e.g., in a defined consortium of isolated bacteria). Bacterial compositions and the bacterial components thereof are generally purified from residual habitat products.

[0110] The term “genome” as used herein includes the DNA comprising the genes (the coding nucleic acid sequences) and the noncoding nucleic acid sequences of a microorganism, and therefore includes introduction of the nucleic acid into, for example, the coding and noncoding DNA of the microorganism.

[0111] The term “Gram-variable” means giving a positive result and/or negative result in the Gram strain test (i.e., retaining the colour of the crystal violet staining reagent). Retention of crystal violet staining by a bacterium is linked to the thickness of the peptidoglycan layer in the bacterial cell wall. Gram-positive bacteria have a thicker peptidoglycan layer. Gram-staining is commonly used to help classify bacterial strains in the field of microbiology.

[0112] As used herein, the term “gut” is understood to refer to the human gastrointestinal tract, also known as the alimentary canal. The gut includes the mouth, pharynx, oesophagus, stomach, small intestine (duodenum, jejenum, ileum), large intestines (cecum and colon) and rectum. While the entire alimentary canal can be colonized by varying species of microbes, the majority of the gut microbiome, in terms of both numbers of species and biomass, resides in the intestines (small and large).

[0113] The terms “marker”, “biomarker” and the like, refer to any compound that can be measured as an indicator of the physiological status of a biological system. The marker may be a biomarker that comprises an amino acid sequence, a nucleic acid sequence and fragments thereof. Exemplary biomarkers include, but are not limited to cytokines, chemokines, growth and angiogenic factors, metastasis related molecules, cancer antigens, apoptosis related proteins, enzymes, proteases, adhesion molecules, cell signalling molecules and hormones. The marker may also be a sugar that, in some embodiments, may not be significantly metabolized in the biological system. The sugar may be, for example, mannitol, lactulose, sucrose, sucralose and combinations of any of the forgoing.

[0114] “Measuring” or “measurement” means assessing the presence, absence, quantity or amount (which can be an effective amount) of a given substance within a sample, including the derivation of qualitative or quantitative concentration levels of such substances, or otherwise evaluating the values or categorization of a subject's clinical parameters. Alternatively, the term “assaying,” “detecting” or “detection” may be used to refer to all measuring or measurement as described in this specification.

[0115] The term “mucosal healing” as used herein, means an improvement in one or more characteristics of that indicate an impaired mucosal layer. Such characteristics are usually determined by colonic endoscopy and include, but are not limited to, erythema, loss of vascular pattern, friability, bleeding, erosions and ulcers. In some circumstances, mucosal healing refers to a complete amelioration of detrimental effects that characterize an impaired mucosal layer. Alternatively, mucosal healing may refer to a reduction or improvement of one or more of the negative effects that characterize an impaired mucosal layer.

[0116] As used herein, the term “pharmaceutical composition” refers to the active agent in combination with a pharmaceutically acceptable carrier (e.g., a carrier commonly used in the pharmaceutical industry). The phrase “pharmaceutically acceptable” is employed herein to refer to those compounds, materials, compositions, and/or dosage forms which are, within the scope of sound medical judgement, suitable for use in contact with the tissues of human beings and animals without excessive toxicity, irritation, allergic response, or other problem or complication, commensurate with a reasonable benefit/risk ratio. In some embodiments of any of the aspects, a pharmaceutically acceptable carrier can be a carrier other than water. In some embodiments, any of the aspects a pharmaceutically acceptable carrier can be a cream, emulsion, gel, liposome, nanoparticle, and/or ointment. In some embodiments of any of the aspects, a pharmaceutically acceptable carrier can be an artificial or engineered carrier (e.g., a carrier that the active ingredient would not be found to occur in or within nature).

[0117] The term “phylogenetic tree” refers to a graphical representation of the evolutionary relationships of one genetic sequence to another that is generated using defined set of phylogenetic reconstruction algorithms (e.g., parsimony, maximum likelihood, or Bayesian). Nodes in the tree represent distinct ancestral sequences and the confidence of any node is provided by a bootstrap or Bayesian posterior probability, which measures branch uncertainty.

[0118] In some embodiments, the term “strain”, refers to a terminal leaf in a phylogenetic tree and is defined by a specific genetic sequence. The specific genetic sequence may be a concatenated alignment of 120 ubiquitous single-copy proteins (Parks et al., 2018) extracted from a genome assembly using GTDB-tk (Chaumeil et al., 2020) or other tools known in the art.

[0119] The term “clade” refers to the set of members of a phylogenetic tree downstream of a stable node (bootstrap value >90%) in a phylogenetic tree. A clade is a group of related organisms representing all of the phylogenetic descendants of a common ancestor. The clade comprises a set of terminal leaves in the phylogenetic tree that is a distinct monophyletic evolutionary unit.

[0120] As used herein, “prebiotic” is understood to mean an ingredient that allows specific changes, both in the composition and/or activity in the gastrointestinal microbiota that may (or may not) confer benefits upon the host. Favoured prebiotics will be those which encourage growth of probiotic compositions or their beneficial functions, but not growth of pathogens nor genes associated with pathogenicity (e.g., toxins).

[0121] As used herein, “probiotic” is understood to mean “live microorganisms which when administered in adequate amounts confer a health benefit on the host”, as currently defined by the World Health Organization.

[0122] The term “species” is defined as a collection of closely related organisms with greater than 97% 16S ribosomal RNA (rRNA) sequence homology and greater than 70% genomic hybridization and sufficiently different from all other organisms so as to be recognized as a distinct unit. Species and other phylogenic identifications are according to the classification known to a person skilled in the art of microbiology.

[0123] As used herein, a “subject” means a human or animal. Usually the animal is a vertebrate such as a primate, rodent, domestic animal or game animal. Primates include chimpanzees, cynomolgus monkeys, spider monkeys, and macaques (e.g., Rhesus). Rodents include mice, rates, woodchucks, ferrets, rabbits, and hamsters. Domestic and game animals include cows, horses, pigs, deer, bison, buffalo, feline species (e.g., domestic cat), canine species (e.g., dog, fox, wolf), avian species (e.g., chicken, emu, ostrich), and fish (e.g., trout, catfish, and salmon). In some embodiments the subject is a mammal (e.g., a primate (e.g., a human)). The terms “individual”, “patient” and “subject” are used interchangeably herein.

[0124] Preferably the subject is a mammal. The mammal can be a human, non-human primate, mouse, rat, dog, cat, horse or cow, but is not limited to these examples. Mammals other than humans can be advantageously used as subjects that represent animal models of inflammatory and autoimmune disorders (e.g., models of gut barrier function). A subject can be male or female.

[0125] As used herein, the terms “treat”, “treatment”, “treating” and the like, refer to therapeutic treatments, wherein the object is to reverse, alleviate, ameliorate, inhibit, slow down or stop the progression or severity of a condition associated with a disease or disorder (e.g., an inflammatory or autoimmune disorder). The term “treating” includes reducing or alleviating at least one adverse effect or symptom of a condition, disease or disorder associated with an inflammatory or autoimmune disorder. Treatment is generally “effective” if one or more symptoms or clinical markers are reduced. Alternatively, treatment is “effective” if the progression of a disease is reduced or halted. That is, “treatment” includes not just the improvement of symptoms or markers, but also a cessation of, or at least slowing of, progress or worsening of symptoms compared to what would be expected in the absence of treatment. Beneficial or desired clinical results include, but are not limited to, alleviation of one or more symptom(s), diminishment of extent of disease, stabilized (i.e., not worsening) state of disease, delay or slowing of disease progression, amelioration, or palliation of the disease state, remission (whether partial or total), and/or decreased mortality, whether detectable or undetectable. The term “treatment” of a disease also includes providing relief from the symptoms or side-effects of the disease (including palliative treatment). A treatment need not cure a disorder (i.e., complete reversal or absence of disease) to be considered effective.

[0126] In some embodiments, sequencing comprises 16S rRNA gene sequencing, which can also be referred to as “16S ribosomal RNA sequencing”, 16S rDNA sequencing” or “16S rRNA sequencing”. Sequencing of the 16S rRNA gene can be used for genetic studies as it is highly conserved between different species of bacteria, but it is not present in eukaryotic species. In addition to highly conserved regions, the 16S rRNA gene also comprises nine hypervariable regions (V1-V9) that vary between species. 16S rRNA gene sequencing typically comprises using a plurality of universal primers that bind to conserved regions of the 16S rRNA gene, PCT amplifying the bacterial 16S rRNA gene regions (including hypervariable regions), and sequencing the amplified 16S rRNA genes with a next-generation sequencing technology as described herein (see, also e.g., U.S. Pat. Nos. 5,654,418; 6,344,316; and 8,889,358; and U.S. Patent Publication Nos. 2013/157,265 and 2018/195,111, which are each incorporated by reference in their entireties).

[0127] Each embodiment described herein is to be applied mutatis mutandis to each and every embodiment unless specifically stated otherwise.

### 2. Bacterial Strains

[0128] The compositions of the invention comprise a bacterial strain of the genus Intestinicoccus. The examples demonstrate that bacteria of this genus are useful for treating or preventing diseases associated with an impaired gut barrier function. The preferred bacterial strains are of the species I. colisanans.

[0129] Intestinicoccus is a genus of bacteria in the class firmicutes. The scientific classification is as follows: bacteria (kingdom); Firmicutes (phylum); Clostridia (class); Oscillospirales (order); Acutalibacteraceae (family); Intestinicoccus (genus). Bacteria within the Intestinicoccus genus are Gram-varia ble, with a coccoid shape, and are obligate anaerobes. These criteria are important because they can inform the phylogenetic classification of bacterial strains.

[0130] The I. colisanans species has not previously been described. It has been was isolated from human stool sample, using the method described in the below examples.

[0131] The breadth of the Intestinicoccus genus and I. colisanans species may be as defined by a Genome Taxonomy Database reference tree, a taxonomic classification system as described in Parks et al., 2018.

[0132] The I. colisanans bacterium deposited under accession number V21/015887 (i.e., I. colisanans MH27-1) was tested in the Examples and is one of the preferred strains of the invention. I. colisanans strain MH27-1 was deposited with the international depositary authority National Measurement Institute (NMI, 1/153 Bertie Street, Port Melbourne, Victoria, 3207, Australia) by Microba IP Pty Ltd (388 Queen Street, Brisbane, Queensland 4000, Australia) on 6 Aug. 2021 as “Intestinicoccus colisanans MH27-1” and was assigned accession number deposited under accession number V21/015887.

[0133] An exemplary 16S rRNA sequence for the I. colisanans MH27-1 strain that was tested is set forth in SEQ ID NO: 1. Bacterial strains of the species I. colisanans may comprise a single 16S rRNA sequence within its genome, or alternatively, may comprise two or more 16S rRNA sequences within its genome (e.g., two copies, three copies, four copies, five copies, six copies, seven copies, eight copies, or more than eight copies). In some embodiments, a bacterial strain may be identified as being of the I. colisanans MH27-1 strain by determining whether the strain comprises a 16S rRNA sequence that corresponds to SEQ ID NO: 1, by any method known in the art. Chromosome sequences for strain I. colisanans MH27-1 are provided in SEQ ID NO: 3 and 4. These sequences were generated using the Illumina NovSeq6000 platform.

[0134] Bacterial strains closely related to the strains MH27-1 are also shown in the examples to be effective for treating or preventing inflammatory and autoimmune disorders, through their beneficial effects on restoring gut barrier function.

[0135] For example, the I. colisanans bacterium deposited under accession number V21/015888 (i.e., I. colisanans MH27-2) was tested in the Examples and is another one of the preferred strains of the invention. An exemplary 16S rRNA sequence for the I. colisanans MH27-2 strain that was tested is set forth in SEQ ID NO: 2. In some embodiments, a bacterial strain may be identified as being of the I. colisanans MH27-2 strain by determining whether the strain comprises a 16S rRNA sequence that corresponds to SEQ ID NO: 2, by any method known in the art. Strain I. colisanans MH27-2 was deposited with the international depositary authority National Measurement Institute (NMI, 1/153 Bertie Street, Port Melbourne, Victoria, 3207, Australia) by Microba IP Pty Ltd (388 Queen Street, Brisbane, QLD 4000, Australia) on 6 Aug. 2021 as “Intestinicoccus colisanans MH27-2” and was assigned accession number V21/015888. The genome of strain I. colisanans MH27-2 comprises a chromosome with sequences as set forth in one or both of SEQ ID NOs: 5 or 6.

[0136] In other examples, exemplary 16S rRNA sequences for the I. colisanans strains MH27-3, MH27-4, MH27-5, and MH27-6 that were tested in the examples are set forth in SEQ ID NOs: 7-10. In some embodiments, a bacterial strain may be identified as being of the I. colisanans MH27-3 strain by determining whether the strain comprises a 16S rRNA sequence that corresponds to SEQ ID NO: 7, by any method known in the art. In some embodiments, a bacterial strain may be identified as being of the I. colisanans MH27-4 strain by determining whether the strain comprises a 16S rRNA sequence that corresponds to SEQ ID NO: 8, by any method known in the art. In some embodiments, a bacterial strain may be identified as being of the I. colisanans MH27-5 strain by determining whether the strain comprises a 16S rRNA sequence that corresponds to SEQ ID NO: 9, by any method known in the art. In some embodiments, a bacterial strain may be identified as being of the I. colisanans MH27-6 strain by determining whether the strain comprises a 16S rRNA sequence that corresponds to SEQ ID NO: 10, by any method known in the art.

[0137] The genome of strain I. colisanans MH27-3 comprises a chromosome with sequences as set forth in one more of SEQ ID NOs: 11-14. The genome of strain I. colisanans MH27-4 comprises a chromosome with sequences as set forth in one more of SEQ ID NOs: 15-18. The genome of strain I. colisanans MH27-5 comprises a chromosome with sequences as set forth in one more of SEQ ID NOs: 19-22.

[0138] In certain embodiments, the bacterial strains of the invention have a 16S rRNA sequence that is at least 97.5%, 98%, 98.5%, 99%, 99.5%, 99.6%, 99.7%, 99.8%, or 99.9% identical to the 16S rRNA sequence of a bacterial strain of I. colisanans. Preferably, the bacterial strain of the invention has a 16S rRNA sequence that is at least 97.5%, 98%, 98.5%, 99%, 99.5%, 99.6%, 99.7%, 99.8%, or 99.9% identical to any one of SEQ ID NOs: 1, 2, or 7-10. In some preferred, the bacterial strain of the invention has a 16S rRNA sequence represented by any one of SEQ ID NOs: 1 2, or 7-10.

[0139] The genome of the bacterial strain may comprise the 16S rRNA sequence set forth in any one of SEQ ID NOs: 1, 2, or 7-10.

[0140] In certain embodiments, the bacterial strain of the invention has a chromosome with sequence identity to one or both of the sequences set forth in SEQ ID NO: 3 or 4. In preferred embodiments, the bacterial strain of the invention has a chromosome with at least 90% sequence identity (e.g., at least 92%, 94%, 95%, 96%, 97%, 97.5%, 98%, 98.5%, 99%, 99.5%, or 100% sequence identity) to one or both of SEQ ID NO: 3 or 4 across at least 60% (e.g., at least 65%, 70%, 75%, 80%, 85%, 95%, 96%, 97%, 98%, 99% or 100%) of SEQ ID NO: 3 or 4. For example, the bacterial strain of the invention may have a chromosome with at least 90% sequence identity to one or both of SEQ ID NO: 3 or 4 across 70% of SEQ ID NO: 3 or 4, or at least 90% sequence identity to one or both of SEQ ID NO: 3 or 4 across 80% of SEQ ID NO: 3 or 4, or at least 90% sequence identity to one or both of SEQ ID NO: 3 or 4 across 90% of SEQ ID NO: 3 or 4, or at least 90% sequence identity to one or both of SEQ ID NO: 3 or 4 across 100% of SEQ ID NO: 3 or 4, or at least 95% sequence identity to one or both of SEQ ID NO: 3 or 4 across 70% of SEQ ID NO: 3 or 4, or at least 95% sequence identity to one or both of SEQ ID NO: 3 or 4 across 80% of SEQ ID NO: 3 or 4, or at least 95% sequence identity to one or both of SEQ ID NO: 3 or 4 across 90% of SEQ ID NO: 3 or 4, or at least 95% sequence identity to one or both of SEQ ID NO: 3 or 4 across 100% of SEQ ID NO: 3 or 4, or at least 98% sequence identity to one or both of SEQ ID NO: 3 or 4 across 70% of SEQ ID NO: 3 or 4, or at least 98% sequence identity to one or both of SEQ ID NO: 3 or 4 across 80% of SEQ ID NO: 3 or 4, or at least 98% sequence identity to one or both of SEQ ID NO: 3 or 4 across 90% of SEQ ID NO: 3 or 4, or at least 98% sequence identity to one or both of SEQ ID NO: 3 or 4 across 100% of SEQ ID NO: 3 or 4. A particularly preferred strain of the invention is the I. colisanans strain deposited under accession number V21/015887. This is the exemplary MH27-1 strain tested in the DSS mouse model presented in the examples and shown to be effective for treating disease. Therefore, the invention provides a cell, such as an isolated cell, of the I. colisanans strain deposited under accession number V21/015887, or a derivative thereof. The invention also provides a composition comprising a cell of the I. colisanans strain deposited under accession number V21/015887, or a derivative thereof. The invention also provides a biologically pure culture of the I. colisanans MH27-1 strain deposited under accession number V21/015887.

[0141] In certain embodiments, the bacterial strain of the invention has a chromosome with sequence identity to SEQ ID NO: 5 or 6. In preferred embodiments, the bacterial strain of the invention has a chromosome with at least 90% sequence identity (e.g., at least 92%, 94%, 95%, 96%, 97%, 97.5%, 98%, 98.5%, 99%, 99.5%, or 100% sequence identity) to one or both of SEQ ID NO: 5 or 6 across at least 60% (e.g., at least 65%, 70%, 75%, 80%, 85%, 95%, 96%, 97%, 98%, 99% or 100%) of SEQ ID NO: 5 or 6. For example, the bacterial strain of the invention may have a chromosome with at least 90% sequence identity to one or both of SEQ ID NO: 5 or 6 across 70% of SEQ ID NO: 5 or 6, or at least 90% sequence identity to one or both of SEQ ID NO: 5 or 6 across 80% of SEQ ID NO: 5 or 6, or at least 90% sequence identity to one or both of SEQ ID NO: 5 or 6 across 90% of SEQ ID NO: 5 or 6, or at least 90% sequence identity to one or both of SEQ ID NO: or 6 across 100% of SEQ ID NO: 5 or 6, or at least 95% sequence identity to one or both of SEQ ID NO: 5 or 6 across 70% of SEQ ID NO: 5 or 6, or at least 95% sequence identity to one or both of SEQ ID NO: 5 or 6 across 80% of SEQ ID NOs: 5 or 6, or at least 95% sequence identity to one or both of SEQ ID NO: 5 or 6 across 90% of SEQ ID NO: 5 or 6, or at least 95% sequence identity to one or both of SEQ ID NO: 5 or 6 across 100% of SEQ ID NO: 5 or 6, or at least 98% sequence identity to one or both of SEQ ID NO: 5 or 6 across 70% of SEQ ID NO: 5 or 6, or at least 98% sequence identity to one or both of SEQ ID NO: or 6 across 80% of SEQ ID NO: 5 or 6, or at least 98% sequence identity to one or both of SEQ ID NO: 5 or 6 across 90% of SEQ ID NO: 5 or 6, or at least 98% sequence identity to one or both of SEQ ID NO: 5 or 6 across 100% of SEQ ID NO: 5 or 6. A particularly preferred strain of the invention is the I. colisanans strain deposited under accession number V21/015888. This is the exemplary MH27-2 strain tested in the DSS mouse model presented in the examples and shown to be effective for treating disease. Therefore, the invention provides a cell, such as an isolated cell, of the I. colisanans strain deposited under accession number V21/015888, or a derivative thereof. The invention also provides a composition comprising a cell of the I. colisanans strain deposited under accession number V21/015888, or a derivative thereof. The invention also provides a biologically pure culture of the I. colisanans MH27-2 strain deposited under accession number V21/015888.

[0142] A derivative of the strains deposited under accession number V21/015887 or V21/015888 may be a daughter strain (progeny) or a strain cultured (subcloned) from the original. A derivative of a strain of the invention may be modified, for example at the genetic level, without ablating the biological activity. In particular, a derivative strain of the invention is therapeutically active. A derivative strain will have comparable activity to the original strains from which it is derived (i.e., the strains deposited under accession numbers V21/015887 or V21/015888). In particular, a derivative strain will elicit comparable effects in at least one disease model (e.g., colitis) as shown in the Examples, which may be identified by using the culturing and administration protocols described in the Examples. A derivative of any one of the V21/015887 or V21/015888 strains will generally be a biotype of the respective V21/015887 or V21/015888 strains.

[0143] References to cells of the I. colisanans strain deposited under accession number V21/015887 include any cells that have the same safety and therapeutic efficacy characteristics as the strains deposited under any one of accession numbers V21/015887 or V21/015888, and such cells are encompassed by the invention.

### 2.1 Bacteria Biotypes

[0144] Bacterial strains that are biotypes of a bacterium deposited under accession numbers V21/015887 or V21/015888 are also expected to be effective for treating or preventing inflammatory and autoimmune disorders. A biotype is a closely related strain that has the same or very similar physiological and biochemical characteristics.

[0145] Strains that are biotypes of a bacterium deposited under accession numbers V21/015887 or V21/015888 and that are suitable for use in the invention may be identified by sequencing other nucleotide sequences for a bacterium deposited under accession numbers V21/015887 or V21/015888. For example, substantially the whole genome may be sequenced and a biotype strain of the invention may have at least 95%, 96%, 97%, 98%, 99%, 99.5% or 99.9% sequence identity across at least 80% of its whole genome (e.g., across at least 85%, 90%, 95% or 99%, or across its whole genome). Other suitable sequences for use in identifying biotype strains may include hsp60 or repetitive sequences such as BOX, ERIC, (GTG)5, or REP (Masco et al., 2003; Kim et al., 2019). Biotype strains may have sequences with at least 95%, 96%, 97%, 98%, 99%, 99.5% or 99.9% sequence identity to the corresponding sequence of a bacterium deposited under accession numbers V21/015887 or V21/015888.

[0146] Alternatively, strains that are biotypes of a bacterium deposited under accession numbers V21/015887 or V21/015888, and restriction fragment analysis and/or PCR analysis, for example by using fluorescent amplified fragment length polymorphism (FAFLP) and repetitive DNA element (rep)-PCR fingerprinting, or protein profiling, or partial 16S or 23S rRNA sequencing. In some preferred embodiments, such techniques may be used to identify other suitable I. colisanans strains.

[0147] In certain embodiments, strains that are biotypes of a bacterium deposited under accession numbers V21/015887 or V21/015888, and that are suitable for use in the invention are strains that provide the same pattern as a bacterium deposited under accession numbers V21/015887 or V21/015888 when analysed by amplified ribosomal DNA restriction analysis (ARDRA), for example when using Sau3AI restriction enzyme (for exemplary methods and guidance see, for example, Sroitkove et al., 2011). Alternatively, biotype strains are identified as strains that have the same carbohydrate fermentation patterns as a bacterium deposited under accession numbers V21/015887 or V21/015888.

[0148] In some embodiments, bacterial strains useful in the invention may be identified by routinely profiling the production and consumption of metabolites by a bacterial strain. It is predicted that the bacterial strains described above and elsewhere herein effect production of acetate. Therefore, in some embodiments, the bacterial strains of the invention induce the production in vivo of the metabolite, acetate. Additionally, in some embodiments the bacterial strains of the invention do not produce butyrate.

[0149] Other Intestinicoccus strains that are useful in the compositions and methods of the invention, such as biotypes of a bacterium deposited under accession numbers V21/015887 or V21/015888, may be identified using any appropriate method or strategy, including the assays described in the examples. For instance, strains for use in the invention may be identified by culturing in anaerobic TY or PYG media and/or administering the bacteria to the DSS-induced gut barrier function model and then assessing cytokine/chemokine levels, as described in the Examples. In particular, bacterial strains that have similar growth patterns, metabolic type and/or surface antigens to a bacterium deposited under accession numbers V21/015887 or V21/015888 may be useful in the invention. A useful strain will have comparable immunomodulatory activity to the V21/015887 or V21/015888 strain. In particular, a biotype strain will elicit comparable effects on host gut function. Furthermore, it is expected that a biotype will have a similar effect in a disease model (e.g., colitis, asthma, arthritis, multiple sclerosis and uveitis disease models) and comparable effects on cytokine/chemokine levels to the effects shown in the Examples, and which may be identified by using the culturing and administration protocols described in the Examples.

### 2.2 Bacterial Strain Viability

[0150] In preferred embodiments, the bacterial strains in the compositions of the invention are viable. In preferred embodiments, the bacterial strains in the compositions of the invention are viable and capable of partially or totally colonising the intestine. In some preferred embodiments, the bacterial strains in the compositions of the invention are live. By way of an example, the bacterial strains in the compositions of the invention have not been heat-killed. The bacteria of the invention may have immune modulatory effects that would not be exhibited by non-viable bacteria, for example because non-viable bacteria cannot produce metabolites and interact with the immune system in a different manner. The cell surface of a viable bacterium is also likely to be significantly different to a killed bacterium, in particular a heat-killed bacterium.

[0151] In some alternative embodiments, that bacteria are not viable. For example, in some embodiments the bacteria are heat-killed.

[0152] In some preferred embodiments, the bacterial strain for use in the invention is naturally-occurring. For example, the bacterial strain has been isolated from the mammalian digestive tract.

[0153] In some preferred embodiments, the bacterial strain for use in the invention has not been genetically engineered. For example, the bacterial strain has not been transformed with recombinant DNA.

### 3. Compositions

[0154] Provided herein are compositions that comprise, consist, or consist essentially of a therapeutically effective amount of a bacterial strain or strains described above and/or elsewhere herein. In some embodiments, the bacteria in the compositions may be identified by strain, species, operational taxonomic unit (OTU), whole genome sequence, 16S rRNA sequence, or other methods known in the art for defining different types of bacteria.

### 3.1 Most Recent Common Ancestor (MRCA)

[0155] In some embodiments, the compositions comprise an effective amount of a bacterial strain that is a phylogenetic descendant of the MRCA of I. colisanans and I. sp002305575 (see, FIG. 1B). Preferably, the phylogenetic classification is as defined by the GTDB (Parks et al., 2018). In some embodiments, the phylogenetic classification is as defined in release 89 (r89) of the GTDB.

[0156] In some embodiments, determining if a bacterial strain is a descendant of a MRCA of I. colisanans and I. sp002305575 may be performed using phylogenetic grouping procedures known in the art. In some embodiments, a rooted phylogenetic tree with I. colisanans and I. sp002305575, and a third taxon of interest (e.g., a taxon to be classified) may be used, with the following analysis packages being applied: Analyses of Phylogenetics and Evolution (“ape”; https://cran.r-project.ora/web/packaaes/ape/index) and Phylogenetic Tool for Comparative Biology (“phytools”; http://cran.r-oroject.org/web/packaaes/phytoos/index.html), in order to determine whether the taxon of interest is useful for the compositions of the present invention. Both ape and phytools are packages written in the R language for use in studying molecular evolution and phylogenetics. The ape and phytools packages provide methods for phylogenetic and evolutionary analysis and their use is known to one of skill in the art. In some embodiments, the following script may be used:

library(“ape”)
library(“phytools”)
input.tree = read.tree(file=”tree_file”)
intest = c(“s_{——}Intestinicoccus colisanans”, “s_{——}Intestinicoccus
sp002305575”)
intest.node = getMRCA(input.tree, intest)
intest.tree = extract.clade(input.tree, intest.node)
print(intest.tree$tip.label)

[0157] In some embodiments, after the script is run, if the taxon of interest is in the printed list, it is a descendant of a MRCA of the two species.

[0158] In other embodiments, different phylogenetic grouping methods known in the art may be used to determine if a bacterial strain is a descendant of a MRCA of I. colisanans and (see, FIG. 1B), including methods that use different analysis packages and are based on different programming languages.

[0159] In some other embodiments, the bacterial strain is a phylogenetic descendant of the MRCA of I. colisanans and I. sp002305575, together with a pharmaceutically acceptable carrier, diluent, or excipient. Suitably, the MRCA is defined at node 23596 of the bac120 phylogenetic tree from the GTDB. In some embodiments, the phylogenetic tree is created by release 89 of the GTDB, however, any suitable subsequent release is considered to give equally as appliable results.

### 3.2 16S rRNA Sequence Identity

[0160] In some embodiments, the 16S rRNA sequence is obtained or determined for a bacterial species to be classified. This query 16S rRNA sequence is compared to 16S rRNA sequences from bacterial species already classified as members of the Intestinicoccus genus. In some embodiments, the query 16S rRNA sequence is compared to the 16S rRNA sequences set forth in SEQ ID NO: 1. In some embodiments, the query 16S rRNA sequence is compared to all known 16S rRNA sequences for bacterial species already classified as members of the Intestinicoccus genus. In other embodiments, the query 16S rRNA sequence is compared to a subset of all known 16S rRNA sequences for bacterial species already classified as members of the Intestinicoccus genus. A percent identity between the query sequence and the compared sequences is determined. If the percent identify of the query sequence is determined to be above a defined threshold, then the bacterial species to be classified is classified as member of the Intestinicoccus genus.

[0161] In some embodiments, the threshold sequence identity is 95%. In some other embodiments, the threshold sequence identity is 97.5%. In some other embodiments, the threshold sequence identity is 99.0%. In some embodiments, the threshold sequence identity is 94.5%, 94.6%, 94.7%, 94.8%, 94.9%, 95.0%, 95.1%, 95.2%, 95.3%, 95.4%, 95.5%, 95.6%, 95.7%, 95.8%, 95.9%, 96.0%, 96.1%, 96.2%, 96.3%, 96.4%, 96.5%, 96.6%, 96.7%, 96.8%, 96.9%, 97.0%, 97.1%, 97.2%, 97.3%, 97.4%, 97.5%, 97.6%, 97.7%, 97.8%, 97.9%, 98.0%, 98.1%, 98.2%, 98.3%, 98.4%, 98.5%, 98.6%, 98.7%, 98.8%, 98.9% 99.0%, 99.1%, 99.2%, 99.3%, 99.4%, 99.5%, 99.6%, 99.7%, 99.8%, 99.9% or 100%.

[0162] In some embodiments, the 16S rRNA sequence is obtained or determined for a bacterial species to be classified. This query 16S rRNA sequence is compared to 16S rRNA sequences from bacterial species already classified as members of the family Acutalibacteraceae (including those set forth in any one of SEQ ID NOs: 1 2, or 7-10). In some embodiments, the query 16S rRNA sequence is compared to all known 16S rRNA sequences for bacterial species already classified as members of the family Acutalibacteraceae. In other embodiments, the query 16S rRNA sequence is compared to a subset of all known 16S rRNA sequences for bacterial species already classified as members of the family Acutalibacteraceae. A percent identity between the query sequence and the compared sequences is determined. If the percent identify of the query sequence is determined to be above a defined threshold, then the bacterial species to be classified is classified as member of the family.

[0163] In some embodiments, the threshold sequence identity is 95%. In some embodiments, the threshold sequence identity is 98.7%. In some embodiments, the threshold sequence identity is 94.8%. In some embodiments, the threshold sequence identity is 94.5%, 94.6%, 94.7%, 94.8%, 94.9%, 95.0%, 95.1%, 95.2%, 95.3%, 95.4%, 95.5%, 95.6%, 95.7%, 95.8%, 95.9%, 96.0%, 96.1%, 96.2%, 96.3%, 96.4%, 96.5%, 96.6%, 96.7%, 96.8%, 96.9%, 97.0%, 97.1%, 97.2%, 97.3%, 97.4%, 97.5%, 97.6%, 97.7%, 97.8%, 97.9%, 98.0%, 98.1%, 98.2%, 98.3%, 98.4%, 98.5%, 98.6%, 98.7%, 98.8%, 98.9% 99.0%, 99.1%, 99.2%, 99.3%, 99.4%, 99.5%, 99.6%, 99.7%, 99.8%, 99.9%, or 100%.

[0164] In some embodiments, the compositions comprise an at least partially isolated bacterial strain of I. colisanans describe above and/or elsewhere herein.

[0165] In certain embodiments, the bacterial strains of the invention have a 16S rRNA sequence that is at least 97.5%, 98%, 98.5%, 99%, 99.5%, 99.6%, 99.7%, 99.8%, or 99.9% identical to the 16S rRNA sequence of a bacterial strain of I. colisanans. Preferably, the bacterial strain of the invention has a 16S rRNA sequence that is at least 97.5%, 98%, 98.5%, 99%, 99.5%, 99.6%, 99.7%, 99.8%, or 99.9% identical to either one of SEQ ID NO: 1 or 2. In some preferred embodiments, the bacterial strain of the invention has a 16S rRNA sequence represented by either one of SEQ ID NO: 1 or 2. In some other preferred embodiments, the bacterial strain of the invention has a 16S rRNA sequence represented by any one of SEQ ID NOs: 7-10.

[0166] The genome of the bacterial strain may comprise the 16S rRNA sequence set forth in any one of SEQ ID NOs: 1 2, or 7-10.

### 3.3 Genomic Sequence Identity

[0167] In certain embodiments, the bacterial strain of the invention has a chromosome with sequence identity to either one of SEQ ID NO: 3 or 4. In preferred embodiments, the bacterial strain of the invention has a chromosome with at least 90% sequence identity (e.g., at least 92%, 94%, 95%, 96%, 97%, 97.5%, 98%, 98.5%, 99%, 99.5%, or 100% sequence identity) to either one of SEQ ID NO: 3 or 4, across at least 60% (e.g., at least 65%, 70%, 75%, 80%, 85%, 95%, 96%, 97%, 98%, 99% or 100%) of SEQ ID NOs: 3 or 4. For example, the bacterial strain of the invention may have a chromosome with at least 90% sequence identity to either one of SEQ ID NO: 3 or 4 across 70% of SEQ ID NOs: 3 or 4, or at least 90% sequence identity to either one of SEQ ID NO: 3 or 4 across 80% of SEQ ID NOs: 3 or 4, or at least 90% sequence identity to either one of SEQ ID NO: 3 or 4 across 90% of SEQ ID NOs: 3 or 4, or at least 90% sequence identity to either one of SEQ ID NO: 3 or 4 across 100% of SEQ ID NOs: 3 or 4, or at least 95% sequence identity to either one of SEQ ID NO: 3 or 4 across 70% of SEQ ID NOs: 3 or 4, or at least 95% sequence identity to either one of SEQ ID NO: 3 or 4 across 80% of SEQ ID NOs: 3 or 4, or at least 95% sequence identity to either one of SEQ ID NO: 3 or 4 across 90% of SEQ ID NOs: 3 or 4, or at least 95% sequence identity to either one of SEQ ID NO: 3 or 4 across 100% of SEQ ID NOs: 3 or 4, or at least 98% sequence identity to either one of SEQ ID NO: 3 or 4 across 70% of SEQ ID NOs: 3 or 4, or at least 98% sequence identity to either one of SEQ ID NO: 3 or 4 across 80% of SEQ ID NOs: 3 or 4, or at least 98% sequence identity to either one of SEQ ID NO: 3 or 4 across 90% of SEQ ID NOs: 3 or 4, or at least 98% sequence identity to either one of SEQ ID NO: 3 or 4 across 100% of SEQ ID NOs: 3 or 4. A particularly preferred strain of the invention is the I. colisanans strain deposited under accession number V21/015887. This is the exemplary I. colisanans MH27-1 strain tested in the DSS mouse model presented in the examples and shown to be effective for treating disease. Therefore, the invention provides a cell, such as an isolated cell, of the I. colisanans strain deposited under accession number V21/015887, or a derivative thereof. The invention also provides a composition comprising a cell of the I. colisanans strain deposited under accession number V21/015887, or a derivative thereof. The invention also provides a biologically pure culture of the I. colisanans MH27-1 strain deposited under accession number V21/015887.

[0168] In certain embodiments, the bacterial strain of the invention has a chromosome with sequence identity to either one of SEQ ID NO: 5 or 6. In preferred embodiments, the bacterial strain of the invention has a chromosome with at least 90% sequence identity (e.g., at least 92%, 94%, 95%, 96%, 97%, 97.5%, 98%, 98.5%, 99%, 99.5%, or 100% sequence identity) to either one of SEQ ID NO: 5 or 6, across at least 60% (e.g., at least 65%, 70%, 75%, 80%, 85%, 95%, 96%, 97%, 98%, 99% or 100%) of SEQ ID NOs: 5 or 6. For example, the bacterial strain of the invention may have a chromosome with at least 90% sequence identity to either one of SEQ ID NO: 5 or 6 across 70% of SEQ ID NOs: 5 or 6, or at least 90% sequence identity to either one of SEQ ID NO: 5 or 6 across 80% of SEQ ID NOs: 5 or 6, or at least 90% sequence identity to either one of SEQ ID NO: 5 or 6 across 90% of SEQ ID NOs: 5 or 6, or at least 90% sequence identity to either one of SEQ ID NO: 5 or 6 across 100% of SEQ ID NOs: 5 or 6, or at least 95% sequence identity to either one of SEQ ID NO: 5 or 6 across 70% of SEQ ID NOs: 5 or 6, or at least 95% sequence identity to either one of SEQ ID NO: 5 or 6 across 80% of SEQ ID NOs: 5 or 6, or at least 95% sequence identity to either one of SEQ ID NO: 5 or 6 across 90% of SEQ ID NOs: 5 or 6, or at least 95% sequence identity to either one of SEQ ID NO: 5 or 6 across 100% of SEQ ID NOs: 5 or 6, or at least 98% sequence identity to either one of SEQ ID NO: or 6 across 70% of SEQ ID NOs: 5 or 6, or at least 98% sequence identity to either one of SEQ ID NO: 5 or 6 across 80% of SEQ ID NOs: 5 or 6, or at least 98% sequence identity to either one of SEQ ID NO: 5 or 6 across 90% of SEQ ID NOs: 5 or 6, or at least 98% sequence identity to either one of SEQ ID NO: 5 or 6 across 100% of SEQ ID NOs: 5 or 6. A particularly preferred strain of the invention is the I. colisanans strain deposited under accession number V21/015887. This is the exemplary I. colisanans MH27-1 strain tested in the DSS mouse model presented in the examples and shown to be effective for treating disease. Therefore, the invention provides a cell, such as an isolated cell, of the I. colisanans strain deposited under accession number V21/015888, or a derivative thereof. The invention also provides a composition comprising a cell of the I. colisanans strain deposited under accession number V21/015888, or a derivative thereof. The invention also provides a biologically pure culture of the I. colisanans MH27-2 strain deposited under accession number V21/015888.

### 4. Functional Features of Bacterial Strains

[0169] Gut barrier dysregulation is a key pathway leading to systemic inflammation. As demonstrated in the examples, the bacterial strains of the invention, and compositions comprising said strains, are effective at enhancing gut barrier function.

[0170] All inflammatory or autoimmune disorders mediated by gut barrier dysregulation causing systemic inflammation in the subject are applicable for treatment with the bacterial strains described above and/or elsewhere herein.

### 4.1 Gut Barrier Function

[0171] Gut barrier (also known as intestinal barrier) function regulates transport and host defense mechanisms at the mucosal interface with the outside world. Transcellular and paracellular fluxes are tightly controlled by membrane pumps, ion channels and tight junctions, adapting permeability to physiological needs.

[0172] The translocation of foreign (i.e., non-host) substances such as lipopolysaccharide (LPS) and other inflammatory compounds from the luminal side of the intestine into the circulating system is inhibited by the epithelial barrier. One of the functions of this epithelial barrier is performed by the tight junctions. Tight junctions, or zonula occludens, are the closely associated areas of two epithelial cells whose membranes join together forming a virtually impermeable barrier to fluid, thereby separating the vascular system from the lumen of the digestive tract. Disturbance at any level, but particularly bacterial translocation due to increased permeability and breakdown of oral tolerance due to compromised epithelial and T cell interaction, can result in inflammation and tissue damage. Thus, a reduction of the tight junction barrier function has been demonstrated to result in an increased translocation of undesirable substances such as LPS from intestinal lumen into the circulating system.

[0173] The present invention provides methods of restoring or improving gut barrier function in a subject, the method comprising administering to the subject a composition that comprises a bacterial strain of I. colisanans, to thereby restore or improve the gut barrier function in the subject. As used in this specification, gut barrier integrity refers to a measure of gut barrier function. High gut barrier integrity can be associated with a lack of gut or intestinal permeability, wherein a high level of gut permeability is indicative of low gut barrier integrity. In a related embodiment, the invention also provides methods of maintaining healthy or normal gut barrier function. Such methods may be used to prevent gut barrier dysregulation is subjects considered to be at high risk of gut barrier dysregulation (e.g., subjects in remission of IBD).

[0174] In some embodiments, at least one biomarker measured in a sample (and, in particular, a biological sample) is used to assess the change, in particular, an improvement, in the gut barrier integrity of a subject.

[0175] In some embodiments of the methods and uses provided in this specification, the composition comprising a bacterial strain of I. colisanans may increase or decrease the levels of one or more biomarkers of gut barrier integrity in a sample from a subject. In some embodiments, depending on the particular biomarker, either an increase or a decrease in the level of the marker is indicative of an increase in gut barrier integrity and/or a decrease in gut permeability. In some embodiments, the biomarker is selected from a cytokine, chemokine, growth factor, angiogenic factor, enzyme, protease, adhesion molecule, cell signalling molecule, hormone or sugar. In some embodiments, the biomarker comprises a cytokine. In some embodiments, the marker comprises a chemokine. In some embodiments, the marker comprises a growth factor. In some embodiments, the marker comprises an angiogenic factor. In some embodiments, the marker comprises an enzyme. In some embodiments, the marker comprises a protease. In some embodiments, the marker comprises an adhesion molecule. In some embodiments, the marker comprises a cell signalling molecule. In some embodiments, the marker comprises a hormone. In some embodiments, the marker comprises a sugar.

[0176] This specification provides assays for biomarkers of intestinal permeability. Biological samples from the subject such as blood (plasma, or serum) or tissue may be used to measure levels of any suitable biomarker including one or more of LPS, lipopolysaccharide binding protein (LPSBP), intestinal fatty acid binding protein (IFABP), Zonulin, bacterial and/or 16S rRNA, but is not limited to these markers. LPS, I-FABP and Zonulin may be measured by enzyme-linked immunosorbent assay (“ELISA”). Techniques and kits for ELISA are well known to those in the art. In some embodiments, elevated LPS, I-FABP and/or Zonulin, when compared to a control in blood, serum, saliva, urine and/or plasma, is used as an indicator of increased intestinal permeability, and, thus, lower gut barrier integrity.

[0177] LPSBP may also be measured by ELISA. In some embodiments, significant changes in LPSBP either higher or lower, when compared to a control, may be used as an indicator of increased intestinal permeability and can confirm a reduced gut barrier integrity.

[0178] In some embodiments, increases in bacterial 16S rRNA is used as an indicator of increased intestinal permeability, and, therefore, a reduction in gut barrier integrity. Bacterial 16S rRNA may be purified from blood, serum, organ tissue or urine using standard nucleic acid isolation protocols. These are, for example, commercially available. The isolated nucleic acids may be detected by qPCR amplification using primers specific for bacterial 16S rRNA sequences or amplification using primers specific for bacterial 16S rRNA and sequencing the resultant amplicons.

[0179] Tight junction proteins that are expressed by the intestinal epithelial cells and regulate intestinal permeability may also be used as biomarkers of intestinal permeability. In some embodiments, tight junction proteins are assayed to determine alterations in intestinal permeability and gut barrier integrity. In some embodiments, the proteins measured may include, but are not limited to, claudins, occludin, ZO-1, and E-cadherin (adherens junction) proteins. Other tight junction proteins may also be assayed. In some embodiments, the tight junction proteins are measured using an immunohistochemical stain. In some embodiments, the tight junction proteins are measured using ELISA.

[0180] In some embodiments, plasma citrulline is assayed to determine alterations in intestinal permeability and gut barrier integrity. A reduction in plasma citrulline levels corresponds to a loss in epithelial cell mass indicating an increase in gut barrier permeability.

[0181] In some embodiments, the method includes oral administration of an insoluble sugar such as sucralose, collection of a bodily fluid such as urine or blood after one or more defined periods of time, and measurement of the insoluble sugar contained in the bodily fluid through standard clinical analytical techniques. The insoluble sugars may include, but are not limited to, mannitol, lactulose, sucrose, sucralose and combinations of any of the foregoing.

[0182] In some embodiments, gut barrier integrity is measured using an in vitro assay. A particularly preferred in vitro assay suitable for measuring gut barrier function is by trans-epithelial electrical resistance (TEER). Such assays are well known in the field (e.g., Srinivasan, 2015; and Lea, 2015).

### 4.2 Mucosal Healing

[0183] Mucosal healing has become an important endpoint to assess the therapeutic effect in inflammatory and autoimmune disorders. The definition of full mucosal healing currently used in IBD (e.g., CD and UC) clinical trials is the “complete absence of all inflammatory and ulcerative lesions”, but this definition lacks validation and does not include mucosal improvement and grading of mucosal healing.

[0184] Mucosal healing is predominantly defined by endoscopic assessment of intestinal inflammation. In order to evaluate the presence or absence of mucosal healing on endoscopy, various endoscopic scoring systems have been developed. These indices allow for the determination of improvements of endoscopic lesions, even when the rather rigid endpoint of mucosal healing and thereby the total disappearance of all mucosal ulcerations is not met. The endoscopic component of the clinical Mayo score, introduced in 1987, is currently the most used score of the mucosal layer in clinical practice (see, Schroeder et al., 1987). It includes the variables erythema, loss of vascular pattern, friability, bleeding, erosions and ulcers, and ranges from 0 to 3. Mucosal healing is classically considered to be a score of 0 (normal mucosa) or 1 (mucosal erythema, decreased vascular pattern, mild friability) (D'Haens, 2007).

[0185] In some other embodiments, mucosal healing is determined to have occurred when the patient is determined to have an endoscopy sub-score of 0 or 1 as assessed by flexible sigmoidoscopy. In certain such embodiments, patients who experience mucosal healing are determined to have an endoscopy sub-score of 0.

[0186] Both corticosteroids and aminosalicylates have been used for decades and are among the most commonly prescribed drugs for repairing the mucous layer (e.g., in patients with UC) (Carvalho and Cotter, 2017). The mechanisms through which they reduce mucosal inflammation include controlling nuclear factor (NF)-kB expression and inflammatory cytokines (directly modulating cell migration and proliferation of epithelial cell lines). Anti-TNF drugs (e.g., infliximab, adalimumab, and golimumuab) act at several steps of mucosal injury, restricting the inflammatory infiltrate and T cell proliferation within the lamina propria (Baert, 1999), and downregulating the expression of metalloproteinases and proinflammatory molecules (Baert, 1999). They also act on the regenerative process, restoring the protective capabilities of the mucosa by reinforcing intestinal permeability and mucosal secretion, activating fibroblasts, and maintaining epithelial regeneration (Suenaert, 2002).

[0187] Other measures of assessing mucosal healing are well known in the art, including the measurement of biomarkers C-reactive protein and calprotectin. An advantage of using in vitro biomarker assays for the assessment of mucosal healing is that such assays are typically far less invasive for the subject. Histopathology is another measure of inflammation, which has been cited as being particularly informative for mucosal healing.

### 4.3 STAT3 Signalling Pathway

[0188] Cytokine pathways mediate a broad range of biological functions, including many aspects of inflammation and immunity. The Janus kinases (JAK), including JAK1, JAK2, JAK3 and tyrosine kinase 2 (TYK2), are cytoplasmic tyrosine kinases that associate with type I and type II cytokine receptors and regulate cytokine signal transduction. Cytokine engagement with cognate receptors triggers activation of receptor associated JAKs and this leads to JAK-mediated tyrosine phosphorylation of signal transducer and activator of transcription (STAT) proteins and ultimately transcriptional activation of specific gene sets (Schindler et al., 2007, J. Biol. Chem. 282: 20059-63). Cytokine receptors are typically functional as heterodimers, and as a result, more than one type of JAK kinase is usually associated with a cytokine receptor complex. The specific JAKs associated with different cytokine receptor complexes have been determined in many cases through genetic studies and corroborated by other experimental evidence.

[0189] STAT3 plays an important role in the activation of several autoimmune and inflammatory disorders, including IBD. The bacterial strains of the present invention significantly suppress IL-23-mediated STAT3 activation. Thus, the present invention provides methods of suppressing or otherwise inhibiting STAT3 signalling in a subject (i.e., IL-23-mediated STAT3 signalling), the method comprising administering to the subject a composition that comprises bacterial strain as described above and/or elsewhere herein. Accordingly, in some embodiments the bacterial strains described herein directly or indirectly suppress STAT3 activity. In some embodiments, the strain of I. colisanans produces a bioactive molecule that binds directly to a STAT3 polypeptide. In some alternative embodiments, the bacterial strain is an indirect inhibitor of STAT3 activation, for example, by binding to a molecule upstream of STAT3 in the IL-23-mediated STAT3 signalling pathway, or by binding to a molecule that regulates STAT3 activity (e.g., ubiquitination). By way of an illustrative example, the bioactive agent may directly bind or antagonize any one of IL-23, JAK2, or TYK2 in order to suppress the IL-23-mediated STAT3 signalling pathway.

[0190] I. colisanans strains reduce the activation of inflammatory cytokines such as IL-6. Chronic inflammation induced by IL-6 can ultimately lead to cell death. Therefore, the bacterial strains of the invention are particularly useful in the treatment or prevention of inflammatory or autoimmune disorders. In some embodiments, the bacterial strains are useful in the treatment of inflammatory or autoimmune disorders characterized by the enhanced activation of IL-6.

### 4.4 Th17 Inflammatory Response

[0191] Some bacterial compositions of the invention are effective for reducing the Th17 inflammatory response. In particular, treatment with the compositions described above and elsewhere herein may modulate Th17 pathway cytokines (including TNF, IL-22, IL-21, and IL-17), and result in clinical improvements in animal models of conditions mediated by the Th17 pathway. Therefore, the compositions of the invention may be useful for treating or preventing inflammatory and autoimmune disorders, and in some embodiments, diseases or conditions mediated by Th17. In particular, the compositions of the invention may be useful for reducing or preventing elevation of the Th17 inflammatory response.

[0192] Th17 cells are a subset of T helper cells that produce, among other cytokines, IL17A, IL17F, IL-21 and IL-22. Th17 cell differentiation may be driven by IL-23. These cytokines and others form important parts of the Th17 pathway, which is a well-established inflammatory signalling pathway that contributes to and underlies a number of inflammatory and autoimmune disorders (as described in, for example, Ye, 2015; Fabro, 2015; Yin, 2014; Cheluvappa, 2014; Schieck, 2014; Balato, 2014). Some diseases that are mediated by Th17 can be ameliorated or alleviated by repressing the Th17 pathway, which may be through a reduction in the differentiation of Th17 cells or a reduction in their activity or a reduction in the level of Th17 pathway cytokines. Diseases mediated by the Th17 pathway may be characterised by increased levels of cytokines produced by Th17 cells, such as IL-17A, IL-17F, IL-21, IL-22, IL-26, IL-9 (reviewed in Monteleone, 2011). Diseases mediated by the Th17 pathway may be characterised by increased expression of Th17-related genes, such as STAT3 or IL-23 receptor. Diseases mediated by the Th17 pathway may be associated with increased levels of Th17 cells.

[0193] IL-17 is a key cytokine that links T cells activation to neutrophil activation and mobilization, hence IL-17 plays a pivotal role in innate immunity. However, due to its role in neutrophil activation, can contribute to inflammatory autoimmune diseases such as inflammatory bowel disease, psoriasis, and rheumatoid arthritis. IL-17 as used herein may refer to any member of the IL-17 family, including IL-17A, IL-17B, IL-17C, IL-17D, IL-17E, and IL-17F. IL-17-mediated diseases and conditions are characterised by high expression of IL-17 and/or the accumulation, or presence of IL-17-positive cells in a tissue affected by the disease or condition. Similarly, IL-17-mediated diseases and conditions are diseases and conditions that are exacerbated by high IL-17 levels or an increase in IL-17 levels, and that are alleviated by low IL-17 levels or a reduction in IL-17 levels. The IL-17 inflammatory response may be local or systemic.

[0194] Examples of diseases and conditions that may be mediated by the Th17 pathway include (but are not limited to) inflammatory bowel disease (such as Crohn's disease and ulcerative colitis); multiple sclerosis; arthritis (such as rheumatoid arthritis, osteoarthritis, psoriatic arthritis, and juvenile idiopathic arthritis); neuromyelitis optica (Devic's disease); ankylosing spondylitis; spondyloarthritis; psoriasis; systemic lupus erythematosus; celiac disease; asthma (such as allergic asthma or neutrophilic asthma); chronic obstructive pulmonary disease (COPD); cancer (such as breast cancer, colon cancer, lung cancer or ovarian cancer); uveitis; scleritis; vasculitis; Behcet's disease; atherosclerosis; atopic dermatitis; emphysema; periodontitis; allergic rhinitis; and allograft rejection. Accordingly, in some aspects the present invention provides methods for treating or preventing one or more of these conditions or diseases, by administering a composition as described above and/or elsewhere herein. In further preferred embodiments, these conditions or diseases are mediated by the STAT3 signalling pathway. In further preferred embodiments, these conditions or diseases are mediated through the Th17 pathway.

[0195] In certain embodiments, the present invention provides methods compositions of the invention are for use in a method of reducing Th17 cell differentiation in the treatment or prevention of a disease or condition mediated by the Th17 pathway. In certain embodiments, the compositions of the invention are for use in treating or preventing an inflammatory or autoimmune disorder, wherein said treatment or prevention is achieved by reducing or preventing elevation of the Th17 inflammatory response. In certain embodiments, the compositions of the invention are for use in treating a patient with an inflammatory or autoimmune disorder, wherein the patient has elevated IL-17 levels or elevated Th17 cells or is exhibiting a Th17 inflammatory response. In certain embodiments, the patient may have been diagnosed with a chronic inflammatory or autoimmune disorder or condition, or the composition of the invention may be for use in preventing an inflammatory or autoimmune disorder or condition developing into a chronic inflammatory or autoimmune disorder or condition. In certain embodiments, the disease or condition may not be responsive to treatment with TNF inhibitors. These uses of the invention may be applied to any of the specific disease or conditions listed in the preceding paragraph.

[0196] The Th17 pathway are often associated with chronic inflammatory and autoimmune disorders, so the compositions of the invention may be particularly useful for treating or preventing chronic diseases or conditions as listed above. In certain embodiments, the compositions are for use in patients with chronic disease. In certain embodiments, the compositions are for use in preventing the development of chronic disease.

[0197] The compositions of the invention may be useful for treating diseases and conditions mediated by the Th17 pathway and for addressing the Th17 inflammatory response, so the compositions of the invention may be particularly useful for treating or preventing chronic disease, treating or preventing disease in patients that have not responded to other therapies (such as treatment with TNF inhibitors), and/or treating or preventing the tissue damage and symptoms associated with Th17 cells. For example, IL-17 is known to activate matrix destruction in cartilage and bone tissue and IL-17 has an inhibitory effect on matrix production in chondrocytes and osteoblasts, so the compositions of the invention may be useful for treating or preventing bone erosion or cartilage damage.

[0198] In certain embodiments, treatment with compositions of the invention provides a reduction or prevents an elevation in IL-17 levels, in particular IL-17A levels. In certain embodiments, treatment with compositions of the invention provides a reduction or prevents an elevation in IFN-γ or IL-6 levels. Such reduction or prevention of elevated levels of these cytokines may be useful for treating or preventing inflammatory and autoimmune disorders and conditions, in particular those mediated by the Th17 pathway.

### 4.5 Th1 Inflammatory Response

[0199] CD4⁺ T cells play an important role in inflammatory disease/disorder pathogenesis, with many subsets of CD4⁺ T cells having been identified as drivers in perpetuating chronic intestinal inflammation (see, Imam et al., 2018). For example, T helper type 1 (Th1) cells accumulate in the intestinal tract of individuals with IBD, and are directly associated with disease. Interferon-γ (IFN-γ) is the defining cytokine produced by Th1 cells. During intestinal inflammation IFN-γ in combination with TNF is proposed to drive intestinal epithelial cell β-catenin signalling and limit their differentiation and proliferation (Imam et al., 2018).

### 5. Methods of Treatment

[0200] In some embodiments, the present invention provides methods of treating or preventing an inflammatory or autoimmune disorder in a subject, the methods comprising administering to the subject a bacterial strain as described above and/or elsewhere herein.

[0201] Suitably, the inflammatory or autoimmune disorder is selected from the group comprising: an inflammatory bowel disease (such as Crohn's disease or ulcerative colitis); asthma (such as allergic asthma or neutrophilic asthma); arthritis (such as rheumatoid arthritis, osteoarthritis, psoriatic arthritis, or juvenile idiopathic arthritis); fatty liver disease (such as nonalcoholic fatty liver disease (NAFLD)); ankylosing spondylitis; psoriasis; systemic lupus erythematosus (SLE); scleroderma; Sjogren's syndrome; vasculitis; and type 1 diabetes mellitus.

### 5.1 Inflammatory Bowel Disease (IBD)

[0202] The examples demonstrate that the compositions of the invention have a beneficial restorative effect on gut barrier function and that they also have anti-inflammatory properties, and so they may be useful in the treatment of IBD. Accordingly, in some embodiments the invention provides a composition comprising a bacterial strain of the genus Intestinicoccus for use in a method of treating or preventing an inflammatory bowel disease. The inventors have identified that treatment with Intestinicoccus strains reduces severity of colitis in a mouse model of disease. Thus, the compositions of the invention may be useful in the treatment of inflammatory diseases. In some embodiments, the compositions of the invention are for use in the treatment or prevention of an IBD. In some embodiments, the invention provides methods of treating or preventing ulcerative colitis. In some embodiments, the invention provides methods of treating or preventing of Crohn's disease. In certain embodiments, the invention provides methods of treating or preventing ulcerations and/or bleeding in the treatment of an IBD, in particular in the treatment of colitis and ulcerative colitis. In preferred embodiments, the invention provides a method of treating or preventing IBD in a subject, the method comprising administering to the subject a composition comprising a bacterial strain of the species I. colisanans. In further preferred embodiments, the invention provides a method of treating or preventing colitis, (particularly ulcerative colitis) in a subject, the method comprising administering to the subject a composition comprising a bacterial strain of the species I. colisanans. In further preferred embodiments, the invention provided methods of reducing at least one side effect of colitis (particularly ulcerative colitis), including ulcerations and/or bleeding.

[0203] IBD is a complex disease that can be caused by multiple environmental and genetic factors. Factors contributing to the onset of IBD include diet, microbiota, intestinal permeability, and genetic susceptibility to increased inflammatory response to gut infection. Symptoms of inflammatory bowel disease include abdominal pain, vomiting, diarrhea, rectal bleeding, severe internal cramps/muscle spasms in the pelvic region, weight loss and anaemia. In certain embodiments, the compositions are for use in reducing one or more symptoms associated with IBD. In certain embodiments, the compositions of the invention are for use in preventing one or more symptoms of IBD.

[0204] IBD may accompany other diseases or conditions, such as cardiovascular disease, neuropsychological disorders, and metabolic syndrome. In certain embodiments, the compositions of the invention are for use in the treatment or prevention of one or more diseases or conditions that accompany IBD.

[0205] IBD is generally diagnosed by biopsy or colonoscopy. Measurements of faecal calprotectin is useful for the preliminary diagnosis of IBD. Other laboratory test for the diagnosis of IBD include, complete blood count, erythrocyte sedimentation rate, comprehensive metabolic panel, faecal occult blood test or C-reactive protein test. Typically, a combination of laboratory testing and biopsy/colonoscopy will be used to confirm diagnosis of IBD. In certain embodiments, the compositions of the invention are for use in a subject diagnosed with IBD.

[0206] In certain embodiments the IBD is Crohn's disease and/or ulcerative colitis. As broadly described above, studies have shown that several inflammatory cytokines are upregulated in the inflammatory mucosa of patients with Crohn's disease and ulcerative colitis, including but not limited to STAT3 signalling and NFκB signalling pathway-mediated cytokines (e.g., IL-17, TNF, IL-21, IL-22). Therefore, inhibition of STAT3 signalling pathway-mediated cytokine activity and/or NFκB signalling pathway-mediated cytokines may be useful in the treatment of Crohn's disease and ulcerative colitis. In certain embodiments, the compositions of the invention are for use in the treatment or prevention of Crohn's disease and/or ulcerative colitis.

[0207] Crohn's disease and ulcerative colitis are complex diseases with an array of probable causes, including genetic risk factors, diet, other lifestyle factors, such as smoking and alcohol consumption, and microbiome composition. Crohn's disease can manifest anywhere along the GI tract, whereas ulcerative colitis is typically prevalent in the large intestine and colon.

[0208] Gastrointestinal symptoms of IBD range from mild to severe and include abdominal pain, diarrhea, faecal blood, ileitis, increased bowel movements, increased flatulence, intestinal stenosis, vomiting, and perianal discomfort. The compositions of the invention may be for use in the treatment of prevention of one or more gastrointestinal symptoms of Crohn's disease and/or ulcerative colitis.

[0209] Systemic symptoms of Crohn's disease and ulcerative colitis include growth defects, such as the inability to maintain growth during puberty, decreased appetite, fever and weight loss. Extra-intestinal features of Crohn's disease include uveitis, photobia, episcleritis, gall stones, seronegative spondyloarthropathy, arthritis, enthesitis, erythema nodosum, pyoderma gangrenosum, deep venous thrombosis, pulmonary embolism, autoimmune haemolytic anaemia, clubbing and osteoporosis. Extra-intestinal features are additional conditions associated with Crohn's disease and/or ulcerative colitis that manifest outside the GI tract. Subjects with Crohn's disease also exhibit increased susceptibility to neurological complications such as seizures, strokes, myopathy, peripheral neuropathy, headache and depression. In certain embodiments, the compositions of the invention are for use in the treatment or prevention of one or more systemic symptoms of Crohn's disease and/or ulcerative colitis. In certain embodiments, the compositions of the invention are for use in the treatment or prevention of one or more extra-intestinal features of Crohn's disease and/or ulcerative colitis.

[0210] The diagnosis of Crohn's disease and ulcerative colitis usually involves carrying out multiple tests and surgical procedures, such as gastroscopy and/or colonoscopy and biopsy, typically of the ileum, radiologic tests, complete blood counts, C-reactive protein tests and erythrocyte sedimentation rates. In certain embodiments, the compositions of the invention are for use in subjects diagnosed with Crohn's disease or ulcerative colitis. In some embodiments, compositions of the invention are for use in treating a subject who has been diagnosed with Crohn's disease or ulcerative colitis.

[0211] Crohn's disease and ulcerative colitis are classified depending on the extent of the region of the GI tract affected (Gasche et al., 2000). A Crohn's disease of both the ileum and colon is classified as Ileocolic Crohn's. In some embodiments, the compositions are for use in the treatment or prevention of Ileocolic Crohn's. In some embodiments, the compositions are for use in a subject diagnosed with Ileocolic Crohn's/Crohn's ileitis is classified if only the ileum is affected. Crohn's colitis is classified if only the colon is affected. In certain embodiments, the compositions are for use in the treatment or prevention of Crohn's ileitis. In some embodiments, the compositions are for use in a subject diagnosed with Crohn's ileitis. In certain embodiments, the compositions are for use in the treatment or prevention of Crohn's colitis. In some embodiments, the compositions are for use in a subject diagnosed with Crohn's colitis.

[0212] Crohn's disease and ulcerative colitis may be treated with a number of therapeutic agents, such as corticosteroids, such as prednisone, immunosuppressive agents, such as azathioprine, or biologics, such as infliximab, adalimumab, and golimumab, vedolizumab and etrolizumab. In certain embodiments, the compositions of the invention are for use in the treatment or prevention of Crohn's disease or ulcerative colitis in combination with an additional therapeutic agent, including but not limited to those listed above. In certain embodiments, the additional therapeutic agent is for use in the treatment or prevention of Crohn's disease and/or ulcerative colitis.

### 5.2 Autoimmune Disorders

[0213] In humans, signs of intestinal inflammation are detectable before the clinical onset of many autoimmune disorders, such as type 1 diabetes (T1D) (Bosi, 2006). Similarly, augmented gut permeability appears before the development of insulitis in diabetes-prone rats in comparison with diabetes-resistant rats (Meddings, 1999; Neu, 2005). Those findings indicate that the breakage of gut barrier integrity with subsequent increased antigen trafficking and occurrence of low-grade intestinal inflammation precede the onset of T1D and are directly related to its pathogenesis, rather than secondary to diabetes-induced metabolic alterations (i.e., hyperglycemia). The gastrointestinal barrier is a fundamental gatekeeper to avoid the contact between luminal content and the human body. The barrier is composed of a mucus layer and an intestinal epithelial barrier (IEB), and both are crucial to prevent the passage of commensal bacteria, pathogens, and food antigens from the lumen into the gut tissue and systemic circulation. The IEB is a single layer of epithelial cells held together by a complex junctional system composed of tight junctional adhesion molecules (JAMs), tricellulin, and angulins whose interaction between themselves and with intracellular scaffolding proteins, i.e., zonula occludens proteins (ZOs), is fundamental to maintain tight junction integrity and control paracellular trafficking. In patients and rat models of T1D alterations of the IEB have been reported in association with gut inflammation (Meddings, 1999; Sapone, 2006). Furthermore, the importance of the gut mucus layer, an important gut barrier containing immunoregulatory molecules such as antimicrobial peptides and mucins, has recently been reported (see, Sorini et al., 2019).

[0214] In some embodiments, bacterial strains from the species I. colisanans may provide therapeutic benefits in the treatment or prevention of asthma, such as allergic asthma or neutrophilic asthma. In certain embodiments, the compositions of the invention are for use in the treatment or prevention of asthma in a subject. In certain embodiments, the invention provides a composition comprising a bacterial strain of the species I. colisanans for use in the treatment or prevention of asthma.

[0215] In some embodiments, bacterial strains from the species I. colisanans may provide therapeutic benefits in the treatment or prevention of GVHD. In certain embodiments, the compositions of the invention are for use in the treatment or prevention of GVHD in a subject. In preferred embodiments, the invention provides a composition comprising a bacterial strain of the species I. colisanans for use in the treatment or prevention of GVHD.

[0216] In some embodiments, bacterial strains from the species I. colisanans may provide therapeutic benefits in the treatment or prevention of arthritis, such as rheumatoid arthritis, osteoarthritis, psoriatic arthritis, or juvenile idiopathic arthritis. In certain embodiments, the compositions of the invention are for use in the treatment or prevention of arthritis in a subject. In certain embodiments, the invention provides a composition comprising a bacterial strain of the species I. colisanans for use in the treatment or prevention of arthritis.

[0217] In some embodiments, bacterial strains from the species I. colisanans may provide therapeutic benefits in the treatment or prevention of multiple sclerosis. In certain embodiments, the compositions of the invention are for use in the treatment or prevention of multiple sclerosis in a subject. In certain embodiments, the invention provides a composition comprising a bacterial strain of the species I. colisanans for use in the treatment or prevention of multiple sclerosis.

[0218] In some embodiments, bacterial strains from the species I. colisanans may provide therapeutic benefits in the treatment or prevention of psoriasis. In certain embodiments, the compositions of the invention are for use in the treatment or prevention of psoriasis in a subject. In certain embodiments, the invention provides a composition comprising a bacterial strain of the species I. colisanans or use in the treatment or prevention of psoriasis.

[0219] In some embodiments, bacterial strains from the species I. colisanans may provide therapeutic benefits in the treatment or prevention of systemic lupus erythematosus (SLE). In certain embodiments, the compositions of the invention are for use in the treatment or prevention of SLE in a subject. In certain embodiments, the invention provides a composition comprising a bacterial strain of the species I. colisanans for use in the treatment or prevention of SLE.

[0220] In some embodiments, bacterial strains from the species I. colisanans may provide therapeutic benefits in the treatment or prevention of allograft rejection. In certain embodiments, the compositions of the invention are for use in the treatment or prevention of allograft rejection in a subject. In certain embodiments, the invention provides a composition comprising a bacterial strain of the species I. colisanans for use in the treatment or prevention of allograft rejection.

### 6. Formulations

[0221] In some embodiments, the compositions of the invention comprises fewer than 40 different bacterial strains. In some embodiments, the composition comprises fewer than 30 different bacterial strains. In some embodiments, the composition comprises fewer than 20 different bacterial strains. In some embodiments, the composition comprises fewer than 10 different bacterial strains. In some embodiments, the composition comprises fewer than 5 different bacterial strains. In some preferred embodiments, the composition comprises fewer than 3 different bacterial strains. In some preferred embodiments, the composition comprises a single bacterial strain. In some embodiments, the composition does not comprise bacteria of the genus Clostridium.

[0222] The compositions of the invention comprise bacteria (i.e., live bacteria and/or killed bacteria). In preferred embodiments of the invention, the composition is formulated in a dried form (e.g., a freeze-dried form). The composition of the invention may comprise granules or gelatin capsules, for example hard gelatin capsules, comprising a bacterial strain of the invention. Preferably, the composition of the invention comprises lyophilised bacteria. Lyophilisation of bacteria is a well-established procedure and relevant guidance is available in, for example, references (Miyamoto-Shinohara, 2008; and Day & Stacey, 2007).

[0223] The composition of the invention may comprise a live, active bacterial culture. The examples demonstrate that cultures of the bacteria of the invention are therapeutically effective.

[0224] In some embodiments, the bacterial strain in the composition of the invention has not been inactivated, for example, has not been heat-inactivated. In some embodiments, the bacterial strain in the composition of the invention has not been killed, for example, has not been heat-killed. In some embodiments, the bacterial strain in the composition of the invention has not been attenuated, for example, has not been heat-attenuated. For example, in some embodiments, the bacterial strain in the composition of the invention has not been killed, inactivated and/or attenuated. For example, in some embodiments, the bacterial strain in the composition of the invention is live. For example, in some embodiments, the bacterial strain in the composition of the invention is viable. For example, in some embodiments, the bacterial strain in the composition of the invention is capable of partially or totally colonising the intestine. For example, in some embodiments, the bacterial strain in the composition of the invention is viable and capable of partially or totally colonising the intestine.

[0225] In some embodiments, the composition comprises a mixture of live bacterial strains and bacterial strains that have been killed. In preferred embodiments, the composition of the invention is encapsulated to enable delivery of the bacterial strain to the intestine. Encapsulation protects the composition from degradation until delivery at the target location through, for example, rupturing with chemical or physical stimuli such as pressure, enzymatic activity, or physical disintegration, which may be triggered by changes in pH. Any appropriate encapsulation method may be used. Exemplary encapsulation techniques include entrapment within a porous matrix, attachment or adsorption on solid carrier surfaces, self-aggregation by flocculation or with cross-linking agents, and mechanical containment behind a microporous membrane or a microcapsule. Guidance on encapsulation that may be useful for preparing compositions of the invention is widely available in the art (for example, in Mitropoulou, 2013; and Kailasapathy, 2002).

[0226] The composition may be administered orally and may be in the form of a tablet, capsule or powder. Encapsulated products are preferred because bacteria of the genus Intestinicoccus are obligate anaerobes.

[0227] A composition of the invention includes a therapeutically effective amount of a bacterial strain of the invention. A therapeutically effective amount of a bacterial strain is sufficient to exert a beneficial effect upon a patient. A therapeutically effective amount of a bacterial strain may be sufficient to result in delivery to and/or partial or total colonisation of the patient's intestine.

[0228] A suitable daily dose of the bacteria, for example for an adult human, may be from about 1×10³ to about 1×10¹¹ colony forming units (CFU); for example, from about 1×10⁷ to about 1×10¹⁰ CFU; in another example from about 1×10⁶ to about 1×10¹⁰ CFU; in another example from about 1×10⁷ to about 1×10¹¹ CFU; in another example from about 1×10⁸ to about 1×10¹⁰ CFU; in another example from about 1×10⁸ to about 1×10¹¹ CFU.

[0229] In certain embodiments, the dose of the bacteria is at least 10⁹ cells per day, such as at least 10¹⁰, at least 10¹¹, or at least 10¹² cells per day.

[0230] In certain embodiments, a dose of the composition may comprise the bacterial strain in an amount of from about 1×10⁶ to about 1×10¹¹ colony forming units (CFU)/g, respect to the weight of the composition. The dose may be suitable for an adult human. For example, the composition may comprise the bacterial strain from about 1×10³ to about 1×10¹¹ CFU/g; for example, from about 1×10⁷ to about 1×10¹⁰ CFU/g; in another example from about 1×10⁶ to about 1×10¹⁰ CFU/g; in another example from about 1×10⁷ to about 1×10¹¹ CFU/g; in another example from about 1×10⁸ to about 1×10¹⁰ CFU/g; in another example from about 1×10⁸ to about 1×10¹¹ CFU/g, from about 1×10⁸ to about 1×10¹⁰ CFU/g. For example, from about 1×10⁸ to about 1×10¹⁰ CFU/g. The dose may be, for example, up to or over 1 g, 3 g, 5 g, and 10 g.

[0231] In some embodiments, the compositions described above and/or elsewhere herein comprise, consist, or consist essentially of an amount of bacterial strain from about 1×10³ to about 1×10¹¹ colony forming units per gram with respect to a weight of the composition.

[0232] In some embodiments, the compositions described above and/or elsewhere herein comprise the bacterial strain at a dose of between 500 mg and 1000 mg, between 600 mg and 900 mg, between 700 mg and 800 mg, between 500 mg and 750 mg or between 750 mg and 1000 mg. In certain embodiments, the invention provides the above pharmaceutical composition, wherein the dried bacteria in the pharmaceutical composition are administered at a dose of between 500 mg and 1000 mg, between 600 mg and 900 mg, between 700 mg and 800 mg, between 500 mg and 750 mg, or between 750 mg and 1000 mg.

[0233] The composition may be formulated as a probiotic. A probiotic is defined by the FAO/WHO as a live microorganism that, when administered in adequate amounts, confers a health benefit on the host.

[0234] Typically, a probiotic, such as the composition of the invention, is optionally combined with at least one suitable prebiotic compound. A prebiotic compound is usually a non-digestible carbohydrate such as an oligosaccharide or polysaccharide, or a sugar alcohol, which is not degraded or absorbed in the upper digestive tract. Known prebiotics include commercial products such as inulin and transgalactoligosaccharides.

[0235] Other prebiotic compounds (such as vitamin C, for example), may be included as oxygen scavengers and to improve the delivery and/or partial or total colonisation and survival in vivo. Alternatively, the probiotic composition of the invention may be administered orally as a food or nutritional product, such as milk or whey based fermented dairy product, or as a pharmaceutical product.

[0236] In certain embodiments, the probiotic composition of the present invention includes a prebiotic compound in an amount of from about 1 to about 30% by weight, respect to the total weight composition (e.g., from 5 to 20% by weight). Known prebiotics include commercial products such as inulin and transgalactoligosaccharides.

[0237] In some embodiments, the prebiotic is a carbohydrate selected from the group comprising or consisting of fructooligosaccharides (or FOS), short-chain fructooligosaccharides, inulin, isomaltoligosaccharides, pectins, xylooligosaccharides (or XOS), chitosanoligosaccharides (or COS), beta-glucans, arable gum modified and resistant starches, polydextrose, tagatose, acacia fibers, carob, oats, and citrus fibers. In one aspect, the prebiotics are the short-chain fructooligosaccharides. Short-chain FOS are not digestible carbohydrates, generally obtained by the conversion of the beet sugar and including a saccharose molecule to which three glucose molecules are bonded.

[0238] The compositions of the invention may comprise pharmaceutically acceptable excipients or carriers, such as those described in Handbook of Pharmaceutical Excipients. Acceptable carriers or diluents for therapeutic use are well known in the pharmaceutical art and are described, for example, in Remington's Pharmaceutical Sciences. Examples of suitable carriers include lactose, starch, glucose, methyl cellulose, magnesium stearate, mannitol, sorbitol and the like. Examples of suitable diluents include ethanol, glycerol and water. The choice of pharmaceutical carrier, excipient or diluent can be selected with regard to the intended route of administration and standard pharmaceutical practice. The pharmaceutical compositions may comprise as, or in addition to, the carrier, excipient or diluent one or more suitable binders, lubricants, suspending agents, coating agents, and/or solubilising agents. Examples of suitable binders include starch, gelatin, natural sugars such as glucose, anhydrous lactose, free-flow lactose, 3-lactose, corn sweeteners, natural and synthetic gums, such as acacia, tragacanth or sodium alginate, carboxymethyl cellulose and polyethylene glycol. Examples of suitable lubricants include sodium oleate, sodium stearate, magnesium stearate, sodium benzoate, sodium acetate, sodium chloride and the like. Preservatives, stabilizers, dyes and even flavouring agents may be provided in the pharmaceutical composition. Examples of preservatives include sodium benzoate, sorbic acid, cysteine and esters of 4-hydroxybenzoic acid, for example, in some embodiments the preservative is selected from sodium benzoate, sorbic acid and esters of 4-hydroxybenzoic acid. Antioxidants and suspending agents may be also used. A further example of a suitable carrier is saccharose. A further example of a suitable preservative is cysteine.

[0239] The compositions of the invention may be formulated as a food product. For example, a food product may provide nutritional benefit in addition to the therapeutic effect of the invention, such as in a nutritional supplement. Similarly, a food product may be formulated to enhance the taste of the composition of the invention or to make the composition more attractive to consume by being more similar to a common food item, rather than to a pharmaceutical composition. In certain embodiments, the composition of the invention is formulated as a milk-based product. The term “milk-based product” means any liquid or semi-solid milk-based or whey-based product having a varying fat content. The milk-based product can be, e.g., cow's milk, goat's milk, sheep's milk, skimmed milk, whole milk, milk recombined from powdered milk and whey without any processing, or a processed product, such as yoghurt, curdled milk, curd, sour milk, sour whole milk, butter milk and other sour milk products. Alternatively, the milk could be a plant-based milk, including for example, soy milk, oat milk, almond milk, coconut milk, or macadamia milk. Another important group includes milk beverages, such as whey beverages, fermented milks, condensed milks, infant or baby milks; flavoured milks, ice cream; milk-containing food such as sweets.

[0240] In some embodiments, the compositions disclosed herein comprise one or more bacterial strains of the genus Intestinicoccus and do not contain bacteria from any other species, or which comprise only de minimis or biologically irrelevant amounts of bacteria from another species. Thus, in some embodiments, the invention provides a composition comprising one or more bacterial strains of the genus Intestinicoccus (e.g., Intestinicoccus colisanans), which does not contain bacteria from any other species or which comprises only de minimis or biologically irrelevant amounts of bacteria from another species, for use in therapy.

[0241] In some embodiments, the compositions comprise one or more bacterial strains of the genus Intestinicoccus and do not contain bacteria from any other genus or comprise only de minimis or biologically irrelevant amounts of bacteria from another. In some embodiments, the compositions comprise one or more bacterial strains of the genus Intestinicoccus (e.g., Intestinicoccus colisanans) and do not contain bacteria from any other genus or comprise only de minimis or biologically irrelevant amounts of bacteria from another.

[0242] In certain embodiments, the compositions disclosed herein contain a single bacterial species and do not contain any other bacterial species. In certain embodiments, the compositions disclosed herein contain a single bacterial strain and do not contain any other bacterial strains. For example, the compositions of the invention may comprise bacteria only of a strain of I. colisanans. Such compositions may comprise only de minimis or biologically irrelevant amounts of other bacterial strains or species. Such compositions may be a culture that is substantially free from other species of organism. In some embodiments, such compositions may be a in a dried form and be substantially free from other species of organism.

[0243] In some embodiments, the invention provides a composition comprising a single bacterial strain of the genus Intestinicoccus which does not contain bacteria from any other strains or which comprises only de minimis or biologically irrelevant amounts of bacteria from another strain for use in therapy.

[0244] In some embodiments, the invention provides a composition comprising a single bacterial strain of the species Intestinicoccus colisanans (e.g., Intestinicoccus colisanans MH27-1, Intestinicoccus colisanans MH27-2, or Intestinicoccus colisanans MH27-3) and which does not contain bacteria from any other strains or which comprises only de minimis or biologically irrelevant amounts of bacteria from another strain for use in therapy.

[0245] In certain embodiments, the compositions of the invention contain a single bacterial strain or species and do not contain any other bacterial strains or species. Such compositions may comprise only de minimis or biologically irrelevant amounts of other bacterial strains or species. Such compositions may be a culture that is substantially free from other species of organism.

[0246] In certain embodiments, the compositions of the invention consist of 1, 2, 3, 4, 5, 6, 7, 8, 9, 10, 11, 12, 13, 14, 15 or 16 bacterial strains or species. In certain embodiments, the compositions consist of from 1 to 10, preferably from 1 to 5 bacterial strains or species. In some embodiments, the compositions disclosed herein comprise more than one strain from within the same species (e.g., more than 1, 2, 3, 4, 5, 6, 7, 8, 9, 10, 15, 20, 25, 30, 35, 40 or 45 strains), and, optionally, do not contain bacteria from any other species. In some embodiments, the compositions disclosed herein comprise less than 50 strains from within the same species (e.g., less than 45, 40, 35, 30, 25, 20, 15, 12, 10, 9, 8, 7, 6, 5, 4 or 3 strains), and, optionally, do not contain bacteria from any other species. In some embodiments, the compositions disclosed herein comprise 1-40, 1-30, 1-20, 1-19, 1-18, 1-15, 1-10, 1-9, 1-8, 1-7, 1-6, 1-5, 1-4, 1-3, 1-2, 2-50, 2-40, 2-30, 2-20, 2-15, 2-10, 2-5, 6-30, 6-15, 16-25, or 31-50 strains from within the same species and, optionally, do not contain bacteria from any other species. In some embodiments, the compositions disclosed herein comprise more than one species from within the same genus (e.g., more than 1, 2, 3, 4, 5, 6, 7, 8, 9, 10, 12, 15, 17, 20, 23, 25, 30, 35 or 40 species), and, optionally, do not contain bacteria from any other genus. In some embodiments, the compositions disclosed herein comprise less than 50 species from within the same genus (e.g., less than 50, 45, 40, 35, 30, 25, 20, 15, 12, 10, 8, 7, 6, 5, 4 or 3 species), and, optionally, do not contain bacteria from any other genus. In some embodiments, the compositions disclosed herein comprise 1-50, 1-40, 1-30, 1-20, 1-15, 1-10, 1-9, 1-8, 1-7, 1-6, 1-5, 1-4, 1-3, 1-2, 2-50, 2-40, 2-30, 2-20, 2-15, 2-10, 2-5, 6-30, 6-15, 16-25, or 31-50 species from within the same genus and, optionally, do not contain bacteria from any other genus. The invention comprises any combination of the foregoing.

[0247] In some embodiments, the compositions of the invention comprise more than one bacterial strain or species. For example, in some embodiments, the compositions of the invention comprise more than one strain from within the same species (e.g., more than 1, 2, 3, 4, 5, 6, 7, 8, 9, 10, 15, 20, 25, 30, 35, 40 or 45 strains), and, optionally, do not contain bacteria from any other species. In some embodiments, the compositions of the invention comprise less than 50 strains from within the same species (e.g., less than 45, 40, 35, 30, 25, 20, 15, 12, 10, 9, 8, 7, 6, 5, 4 or 3 strains), and, optionally, do not contain bacteria from any other species. In some embodiments, the compositions of the invention comprise 1-40, 1-30, 1-20, 1-19, 1-18, 1-15, 1-10, 1-9, 1-8, 1-7, 1-6, 1-5, 1-4, 1-3, 1-2, 2-50, 2-40, 2-30, 2-20, 2-15, 2-10, 2-5, 6-30, 6-15, 16-25, or 31-50 strains from within the same species and, optionally, do not contain bacteria from any other species. In some embodiments, the compositions of the invention comprise more than one species from within the same genus (e.g., more than 1, 2, 3, 4, 5, 6, 7, 8, 9, 10, 12, 15, 17, 20, 23, 25, 30, 35 or 40 species), and, optionally, do not contain bacteria from any other genus. In some embodiments, the compositions of the invention comprise less than 50 species from within the same genus (e.g., less than 50, 45, 40, 35, 30, 25, 20, 15, 12, 10, 8, 7, 6, 5, 4 or 3 species), and, optionally, do not contain bacteria from any other genus. In some embodiments, the compositions of the invention comprise 1-50, 1-40, 1-30, 1-20, 1-15, 1-10, 1-9, 1-8, 1-7, 1-6, 1-5, 1-4, 1-3, 1-2, 2-50, 2-40, 2-30, 2-20, 2-15, 2-10, 2-5, 6-30, 6-15, 16-25, or 31-50 strains from within the same genus and, optionally, do not contain bacteria from any other genus. The invention comprises any combination of the foregoing.

[0248] In certain embodiments, the pharmaceutical composition of the invention comprises between 1-50 distinct bacterial strains, such as between 1-50, 1-40, 1-30, 1-20, 1-19, 1-18, 1-17, 1-16, 1-15, 1-14, 1-13, 1-12, 1-11, 1-10, 1-9, 1-8, 1-7, 1-6, 1-5, 1-4, 1-3 or 2 distinct bacterial strains. In certain embodiments, the pharmaceutical composition of the invention comprises between 1-50 distinct bacterial strains, such as between 1-50, 1-40, 1-30, 1-20, 1-19, 1-18, 1-17, 1-16, 1-15, 1-14, 1-13, 1-12, 1-11, 1-10, 1-9, 1-8, 1-7, 1-6, 1-5, 1-4, 1-3 or 2 distinct bacterial strains.

[0249] In some embodiments, the composition of the invention additionally comprises a bacterial strain that has the same safety and therapeutic efficacy characteristics as a strain deposited at the NMI (Australia) under accession no. V21/015887 and/or V21/015888.

[0250] In some embodiments in which the composition of the invention comprises more than one bacterial strain, species or genus, the individual bacterial strains, species or genera may be for separate, simultaneous or sequential administration. For example, the composition may comprise all of the more than one bacterial strain, species or genera, or the bacterial strains, species or genera may be stored separately and be administered separately, simultaneously or sequentially. In some embodiments, the more than one bacterial strains, species or genera are stored separately but are mixed together prior to use.

[0251] Preferably, the compositions disclosed herein are to be administered to the gastrointestinal (GI) tract in order to enable delivery to, and/or partial or total colonisation of, the intestine with the bacterial strain of the invention. In other words, the bacteria may colonise some or all of the GI tract and such colonisation may be transient or permanent. More specifically, the phrase “total colonisation of the intestine” means that bacteria have colonised all parts of the intestine (i.e., the small intestine, large intestine and rectum). Additionally or alternatively, the term “total colonisation” means that the bacteria engraft permanently in some or all parts of the intestine.

[0252] Similarly, the phrase “partial colonisation of the intestine” means that bacteria have colonised some but not all parts of the intestine. Additionally or alternatively, the term “partial colonisation” means that the bacteria engraft transiently in some or all parts of the intestine.

[0253] The transience of engraftment of bacteria can be determined by assessing (e.g., in a fecal sample) the abundance of the bacterial strain of the invention periodically (e.g., daily or weekly) following the end of a dosing interval to determine the washout period, i.e., the period between conclusion of the dosing interval and there being no detectable levels of the bacterial strain of the invention present. In some embodiments, the washout period is 14 days or less, 12 days or less, 10 days or less, 7 days or less, 4 days or less, 3 days or less, 2 days or less, or 1 day or less.

[0254] In some embodiments, the bacteria described above or elsewhere herein engraft transiently in the large intestine.

[0255] In some embodiments, the bacterial strains of the invention are obtained from human adult faeces. In some embodiments in which the composition of the invention comprises more than one bacterial strain, all of the bacterial strains are obtained from human adult faeces or if other bacterial strains are present they are present only in de minimis amounts. The bacteria may have been cultured subsequent to being obtained from these human adult faeces and being used in a composition of the invention.

[0256] In some embodiments, the one or more Intestinicoccus bacterial strain is/are the only therapeutically active agents in a composition of the invention. In some embodiments, the bacterial strains in the composition is/are the only therapeutically active agents in a composition of the invention.

[0257] The compositions for use in accordance with the invention may or may not require marketing approval.

[0258] In certain embodiments, the invention provides the above pharmaceutical composition, wherein said bacterial strain is in a dried form. In some cases, the bacterial strain is reconstituted prior to administration. In some cases, the reconstitution is by use of a diluent described herein. In certain embodiments, the invention provides the above pharmaceutical composition, wherein said bacterial strain is spray dried. In certain embodiments, the invention provides the above pharmaceutical composition, wherein the bacterial strain is lyophilised or spray dried and wherein it is live. In certain embodiments, the invention provides the above pharmaceutical composition, wherein the bacterial strain is lyophilised or spray dried and wherein it is viable. In certain embodiments, the invention provides the above pharmaceutical composition, wherein the bacterial strain is lyophilised or spray dried and wherein it is capable of partially or totally colonising the intestine. In certain embodiments, the invention provides the above pharmaceutical composition, wherein the bacterial strain is dried (e.g., lyophilised or spray dried) and wherein it is viable and capable of partially or totally colonising the intestine. In some of the same embodiments and some alternative embodiments, the bacterial strain transiently colonises the intestine.

[0259] In some cases, the lyophilised or spray dried bacterial strain is reconstituted prior to administration. In some cases, the reconstitution is by use of a diluent described herein.

[0260] The compositions of the invention can comprise pharmaceutically acceptable excipients, diluents or carriers.

[0261] In certain embodiments, the invention provides a pharmaceutical composition comprising: a bacterial strain of the invention; and a pharmaceutically acceptable excipient, carrier or diluent; wherein the bacterial strain is in an amount sufficient to treat or prevent an inflammatory or autoimmune disorder when administered to a subject in need thereof. In some preferred embodiments, the inflammatory or autoimmune disorder is selected from the group comprising: an inflammatory bowel disease (such as Crohn's disease or ulcerative colitis); asthma (such as allergic asthma or neutrophilic asthma); arthritis (such as rheumatoid arthritis, osteoarthritis, psoriatic arthritis, or juvenile idiopathic arthritis); fatty liver disease (such as nonalcoholic fatty liver disease (NAFLD)); ankylosing spondylitis; psoriasis; systemic lupus erythematosus (SLE); scleroderma; Sjogren's syndrome; vasculitis; and type 1 diabetes mellitus.

[0262] In certain embodiments, the invention provides pharmaceutical composition comprising: a bacterial strain of the invention; and a pharmaceutically acceptable excipient, carrier or diluent; wherein the bacterial strain is in an amount sufficient to treat or prevent an inflammatory or autoimmune disorder mediated by the STAT3 signalling pathway. In preferred embodiments, said disorder is selected from the group consisting of an inflammatory bowel disease (such as Crohn's disease or ulcerative colitis); asthma (such as allergic asthma or neutrophilic asthma); arthritis (such as rheumatoid arthritis, osteoarthritis, psoriatic arthritis, or juvenile idiopathic arthritis); fatty liver disease (such as nonalcoholic fatty liver disease (NAFLD)); ankylosing spondylitis; psoriasis; systemic lupus erythematosus (SLE); scleroderma; Sjogren's syndrome; vasculitis; and type 1 diabetes mellitus.

[0263] In certain embodiments, the invention provides the above pharmaceutical composition, wherein the amount of the bacterial strain is from about 1×10³ to about 1×10¹¹ colony forming units (CFU) per gram with respect to a weight of the composition.

[0264] In certain embodiments, the invention provides the above pharmaceutical composition, wherein the composition is administered at a dose of up to or over 1 g, 3 g, 5 g or 10 g.

[0265] In certain embodiments, the invention provides the above pharmaceutical composition, wherein the composition is administered by a method selected from the group consisting of oral, rectal, subcutaneous, nasal, buccal, and sublingual.

[0266] In certain embodiments, the invention provides the above pharmaceutical composition, comprising a carrier selected from the group consisting of lactose, starch, glucose, methyl cellulose, magnesium stearate, mannitol and sorbitol.

[0267] In certain embodiments, the invention provides the above pharmaceutical composition, comprising a diluent selected from the group consisting of ethanol, glycerol and water.

[0268] In certain embodiments, the invention provides the above pharmaceutical composition, comprising an excipient selected from the group consisting of starch, gelatin, glucose, anhydrous lactose, free-flow lactose, beta-lactose, corn sweetener, acacia, tragacanth, sodium alginate, carboxymethyl cellulose, polyethylene glycol, sodium oleate, sodium stearate, magnesium stearate, sodium benzoate, sodium acetate and sodium chloride.

[0269] In certain embodiments, the invention provides the above pharmaceutical composition, further comprising at least one of a preservative, an antioxidant and a stabilizer.

[0270] In certain embodiments, the invention provides the above pharmaceutical composition, comprising a preservative selected from the group consisting of sodium benzoate, sorbic acid and esters of 4-hydroxybenzoic acid.

[0271] In certain embodiments, the invention provides the above pharmaceutical composition, wherein said bacterial strain is in a dried form (e.g., lyophilised, spray dried, fluidized bed dried, etc.).

[0272] In certain embodiments, the invention provides the above pharmaceutical composition, wherein when the composition is stored in a sealed container at about 4° C. or about 25° C. and the container is placed in an atmosphere having 50% relative humidity, at least 80% of the bacterial strain as measured in colony forming units, remains after a period of at least about: 1 month, 3 months, 6 months, 1 year, 1.5 years, 2 years, 2.5 years or 3 years.

[0273] In some embodiments, the composition of the invention is provided in a sealed container comprising a composition as described herein. In some embodiments, the sealed container is a sachet or bottle. In some embodiments, the composition of the invention is provided in a syringe comprising a composition as described herein.

[0274] The composition of the present invention may, in some embodiments, be provided as a pharmaceutical formulation. For example, the composition may be provided as a tablet or capsule. In some embodiments, the capsule is a gelatine capsule (“gel-cap”). The capsule can be a hard or a soft capsule. In some embodiments, the formulation is a soft capsule. Soft capsules are capsules which may, owing to additions of softeners, such as, for example, glycerol, sorbitol, maltitol and polyethylene glycols, present in the capsule shell, have a certain elasticity and softness. Soft capsules can be produced, for example, on the basis of gelatine or starch. Gelatine-based soft capsules are commercially available from various suppliers. Depending on the method of administration, such as, for example, orally or rectally, soft capsules can have various shapes, they can be, for example, round, oval, oblong or torpedo-shaped. Soft capsules can be produced by conventional processes, such as, for example, by the Scherer process, the Accogel process or the droplet or blowing process.

[0275] In some embodiments, the compositions disclosed herein are administered orally. Oral administration may involve swallowing, so that the compound enters the GI tract.

[0276] Pharmaceutical formulations suitable for oral administration include solid plugs, solid microparticulates, semi-solid and liquid (including multiple phases or dispersed systems) such as tablets; soft or hard capsules containing multi- or nano-particulates, liquids (e.g., aqueous solutions), emulsions or powders; lozenges (including liquid-filled); chews; gels; fast dispersing dosage forms; films; ovules; sprays; and buccal/mucoadhesive patches.

[0277] In some embodiments the pharmaceutical formulation is an enteric formulation, i.e., a gastro-resistant formulation (for example, resistant to gastric pH) that is suitable for delivery of the composition of the invention to the intestine by oral administration. Enteric formulations may be particularly useful when the bacteria or another component of the composition is acid-sensitive (e.g., prone to degradation under gastric conditions).

[0278] In some embodiments, the enteric formulation comprises an enteric coating. In some embodiments, the formulation is an enteric-coated dosage form. For example, the formulation may be an enteric-coated tablet or an enteric-coated capsule, or the like. The enteric coating may be a conventional enteric coating, for example, a conventional coating for a tablet, capsule, or the like for oral delivery. The formulation may comprise a film coating, for example, a thin film layer of an enteric polymer (e.g., an acid-insoluble polymer).

[0279] In some embodiments, the enteric formulation is intrinsically enteric, for example, gastro-resistant without the need for an enteric coating. Thus, in some embodiments, the formulation is an enteric formulation that does not comprise an enteric coating. In some embodiments, the formulation is a capsule made from a thermogelling material. In some embodiments, the thermogelling material is a cellulosic material, such as methylcellulose, hydroxymethylcellulose or hydroxypropylmethylcellulose (HPMC). In some embodiments, the capsule comprises a shell that does not contain any film forming polymer. In some embodiments, the capsule comprises a shell and the shell comprises hydroxypropylmethylcellulose and does not comprise any film-forming polymer (as described in United States Patent Publication No. US2016/0067188). In some embodiments, the formulation is an intrinsically enteric capsule (for example, VCAPS® from Capsugel).

[0280] In some embodiments, the composition is a probiotic or a medical food comprising a bacterial strain of I. colisanans. The bacteria can be administered, for instance, as a probiotic, as a capsule, tablet, caplet, pill, troche, lozenge, power, and/or granule. This strain can also be formulated as a nutraceutical, conventional food, medical food, or drug. The bacteria can also be administered as part of a fecal transplant or via suppository. In some embodiments, the composition is formulated for delivery to the gut, as described further herein, in some embodiments had the composition further comprise a prebiotic.

### 6.1 Co-Administerinp with Additional Agents

[0281] In some embodiments, the methods described herein can further comprise co-administering a second agent and/or treatment to the subject (e.g., as part of a therapy). The combination therapy, where employed, can be tailored to the particular indication. For example, where a strain of the species I. colisanans is administered to treat an inflammatory disorder (e.g., an inflammatory bowel disease), it can be administered in combination with an anti-inflammatory agent or therapy as known in the art of approved for clinical treatment of an inflammatory disorder. Other indications can be similarly treated with, for example, strains of the species I. colisanans as described herein in combination with agents known in the art or approved for the clinical treatment of those indications.

[0282] Suitable anti-inflammatory agents that could be used in the treatment of an inflammatory bowel disease include, but not necessarily limited are, the group comprising 5-aminosaliculates, corticosteroids, azathioprine, infliximab, and adalimumab.

[0283] The present invention also includes the compositions as described above, further comprising an anti-inflammatory agent. Such compositions can optionally be in the form of a single composition, or alternatively, two of more separate compositions.

### 7. Screening Methods

[0284] The invention also includes methods of identifying bacterial strains that are suitable for use in the methods of the present invention. Such methods typically include screening for a bacterial strain with a particular functional activity. Suitable assays include those described in the below examples, but any assay for measuring gut barrier function, mucosal healing, modulation of NF-κB activation, or modulation of STAT3 signalling are equally as applicable.

[0285] In some embodiments, the screening method identifies the ability of a bacterial strain of Intestinicoccus to modulate STAT3 signalling pathway. By way of an illustrative example, the invention provides a method of blocking or otherwise inhibiting the activation of STAT3 signalling in a target cell, the method comprising contacting the target cell with at least a soluble component of a bacterial cell preparation of the species Intestinicoccus colisanans, to block or otherwise inhibit the activation of STAT3 signalling in the target cell.

[0286] In some embodiments of this type, the target cell is selected from the group comprising screening a bacterial strain for a functional reporter cell (e.g., a HEK cell), an immune cell (e.g., a Th17 immune cell), an epithelial cell, and an endothelial cell.

[0287] In some embodiments, the bacterial cell preparation comprises a bacterial cell culture. Suitably, the soluble component may comprise the supernatant of the bacterial cell culture. In some embodiments of this type, the soluble component is substantially depleted of bacterial cells.

[0288] In some alternative embodiments, the bacterial cell preparation comprises a bacterial cell pellet. Preferably, the bacterial cells of the cell pellet are lysed by any means known in the art. After cell lysis, it is typical for the cell lysate soluble fraction to be separated from the insoluble fraction. The cell lysate may be subject to further processing before being during the screening assay. (e.g., diluted in a buffer), or exposed to a processing reagent.

### 8. Modes of Administration

[0289] Preferably, the compositions of the invention are to be administered to the GI tract in order to enable delivery to the intestine with the bacterial strain of the invention. Preferably, the compositions of the invention are formulated to be administered to the GI tract in order to enable delivery to the intestine with the bacterial strain of the invention. In some embodiments the compositions of the invention are formulated to be administered to the GI tract in order to enable delivery to, and partial or total colonization of, the intestine with the bacterial strain of the invention.

[0290] In certain embodiments, the compositions of the invention may be administered as a foam, as a spray or a gel.

[0291] In certain embodiments, the compositions of the invention may be administered as a suppository, such as a rectal suppository, for example in the form of a theobroma oil (cocoa butter), synthetic hard fat (e.g., SUPPOCIRE®, WITEPSOL), glycerogelatin, polyethylene glycol, or soap glycerin composition.

[0292] In certain embodiments, the compositions of the invention are administered to the GI tract via a tube, such as a nasogastric tube, orogastric tube, gastric tube, jejunostomy tube (J-tube), percutaneous endoscopic gastrostomy (PEG), or a port, such as a chest wall port that provides access to the stomach, jejunum and other suitable access ports.

[0293] The compositions of the invention may be administered once, or they may be administered sequentially as part of a treatment regimen. In certain embodiments, the compositions of the invention are to be administered daily (either once or several times). In certain embodiments, the compositions disclosed herein are administered regularly, such as daily, every two days, or weekly, for an extended period of time, such as for at least one week, two weeks, one month, two months, six months, or one year.

[0294] In some embodiments, the compositions disclosed herein are administered for 7 days, 14 days, 16 days, 21 days or 28 days or no more than 7 days, 14 days, 16 days, 21 days, or 28 days. For example, in some embodiments the compositions disclosed herein are administered for 16 days.

[0295] In certain embodiments of the invention, treatment according to the invention is accompanied by assessment of the patient's gut microbiota. Treatment may be repeated if delivery of and/or partial or total colonisation with the strain of the invention is not achieved such that efficacy is not observed, or treatment may be ceased if delivery and/or partial or total colonisation is successful, and efficacy is observed.

[0296] In certain embodiments, the composition of the invention may be administered to a pregnant animal, for example a mammal such as a human in order to prevent an inflammatory or autoimmune disorder (such as those disclosed herein) developing in her child in utero and/or after it is born.

[0297] The compositions of the invention may be administered to a patient that has been diagnosed with: a disease or condition mediated by gut barrier function dysregulation; or that has been identified as being at risk of a disease or condition mediated by gut barrier dysfunction; a disease or condition mediated by the STAT3 signalling pathway, or that has been identified as being at risk of a disease or condition mediated by the STAT3 signalling pathway; or an inflammatory or autoimmune disorder (such as those disclosed herein). The compositions may also be administered as a prophylactic measure to prevent the development of diseases or conditions mediated by the STAT3 signalling pathway in a healthy patient.

[0298] The compositions disclosed herein may be administered to a patient that has been diagnosed with an inflammatory or autoimmune disorder, in particular an inflammatory or autoimmune disorder mediated by the microbiota-gut axis, or that has been identified as being at risk of an inflammatory or autoimmune disorder, in particular an inflammatory or autoimmune disorder mediated by the microbiota-gut axis. The compositions may also be administered as a prophylactic measure to prevent the development of inflammatory or autoimmune disorders, in particular inflammatory or autoimmune disorders mediated by the microbiota-gut axis in a healthy patient.

[0299] The compositions of the invention may be administered to a patient that has been identified as having an abnormal gut microbiota. For example, the patient may have reduced or absent colonisation by bacteria of the genus Intestinicoccus, in particular I. colisanans.

[0300] The compositions of the invention may be administered as a food product, such as a nutritional supplement.

[0301] Generally, the compositions of the invention are for the prevention or treatment of human diseases, although they may be used to treat animals including monogastric mammals such as poultry, pigs, cats, dogs, horses or rabbits. The compositions of the invention may be useful for enhancing the growth and performance of animals. If administered to animals, oral gavage may be used.

[0302] In some embodiments, the subject to whom the composition is to be administered is an adult human. In some embodiments, the subject to whom the composition is to be administered is an infant human.

### 9. Culturing Methods

[0303] The bacterial strains for use in the present invention can be cultured using standard microbiology techniques as detailed in, for example, reference as taught in McSweeney, 2005.

[0304] The solid or liquid medium used for culture may, for example, be selected from TY or PYG medium.

[0305] Illustrative media formulations that are suitable for use with the present invention include those provided in Table 1.

TABLE 1
CULTURE MEDIA FORMULATIONS

| | TY | | PYG | | YG/V | | YG/P | |
|---|---|---|---|---|---|---|---|---|
| Phytone peptone | | | | | | | 20 | g |
| Tryptone | 1 | g | 20 | g | 20 | g | | |
| Vegetable | | | | | 20 | g | | |
| tryptone | | | | | | | | |
| Yeast extract | 0.25 | g | 10 | g | 10 | g | 10 | g |
| Glucose | 0.4 | g | 10 | g | 10 | g | 10 | g |
| Cellobiose | 0.1 | g | | | | | | |
| Maltose | 0.1 | g | | | | | | |
| Hemin solution | 1 | mL | 1 | mL | | | | |
| Salts 2* | 3.8 | mL | 38 | mL | 38 | mL | 38 | mL |
| Salts 3* | 3.8 | mL | 38 | mL | 38 | mL | 38 | mL |
| Sodium | 0.8 | g | 8 | g | 8 | g | 8 | g |
| bicarbonate | | | | | | | | |
| Resazurin | 0.1 | mL | 1 | mL | 1 | mL | 1 | mL |
| Cysteine | 1 | g | 1 | g | 1 | g | 1 | g |

| | | | | |
|---|---|---|---|---|
| Water | to 100 mL | to 1000 mL | to 1000 mL | To 1000 mL |

*Salts solution 2: K₂HPO₄ 6 g/L.
*Salts solution 3: KH₂PO₄ 6 g/L, (NH₄)₂SO₄ 6 g/L, NaCl 12 g/L, MgSO₄•7H 2.5 g/L, CaCl₂•2H₂O 1.6 g/L.
*Resazurin Stock 1000x (0.1%): 100 mg in 100 mL H₂O.

[0306] In order that the invention may be readily understood and put into practical effect, particular preferred embodiments will now be described by way of the following non-limiting experimental examples.

### EXAMPLES

### Intestinicoccus colisanans Association with Health and Disease

[0307] Inflammatory bowel disease is characterized by structure-function changes to the microbiome with a significant reduction in both the prevalence and abundance of select gut bacteria in the IBD gut when compared to the healthy gut. Several studies have shown that these bacteria may modulate IBD pathogenesis (Mallone et al., 2011; and Sokol et al., 2008) however a key obstacle to using these bacteria to develop new therapeutics has been that low resolution 16S rRNA based profiling do not provide sufficient resolution to accurately discriminate against health and IBD associated strains at a low taxonomic level (i.e., genus, species, strain).

[0308] The inventors used the Microba Disease Database (MDD), which contains high resolution faecal gut metagenomic data and associated host metadata for 6,020 adults, to study the prevalence of I. colisanans in inflammatory and autoimmune diseases. Metagenomic sequence reads were analysed using the Microba Community Profiler (MCP) (Parks et al., 2021).

[0309] I. colisanans was considered to be prevalent in healthy humans but were less detected in inflammatory and autoimmune diseases (FIG. 1A). The strongest effect was observed for IBD, including both major subtypes ulcerative colitis and Crohn's disease (FIG. 2A, and Table 2). This observation was replicated in an independent IBD cohort previously published by Harvard ((Franzosa et al., 2018), FIG. 1B, and Table 3).

TABLE 2
ASSOCIATION STATISTICS BETWEEN I. COLISINANS
AND INFLAMMATORY DISEASES

| | P | | |
|---|---|---|---|
| | (Fisher's | | |
| | exact | | Prevalence |
| Condition | test) | FDR | (%) |
| Healthy | | | 82.1 |
| Asthma | 0.00037 | 0.00243 | 68.3 |
| Rheumatoid | 2.0 × 10⁻⁴ | 0.00719 | 60.9 |
| arthritis | | | |
| Fatty liver | 0.019 | 0.0904 | 68.7 |
| IBD | 8.1 × 10−¹⁶ | 2.99 × 10⁻¹³ | 42.6 |
| Crohn's disease | 1.1 × 10⁻⁸ | 7.47 × 10⁻⁷ | 39.5 |
| Ulcerative colitis | 1.6 × 10⁻¹¹ | 2.36 × 10⁻⁹ | 43.9 |
| Non-alcohol fatty | 0.00071 | 0.0126 | 57.5 |
| liver disease | | | |
| Systemic | 0.007 | 0.0319 | 70.2 |
| autoimmune | | | |
| disease | | | |

TABLE 3
ASSOCIATION STATISTICS BETWEEN
I. COLISANANS AND IBD

| | | | | | | | P |
|---|---|---|---|---|---|---|---|
| | Prevalence (%) | | | | | | Cochran- |
| | Con- | | | | | | Mantel- |
| | trol | CD | UC | Control | CD | UC | Haenszel |
| Taxon | MDD | MDD | MDD | Harvard | Harvard | Harvard | test |
| I. | 82.1 | 39.5 | 43.9 | 80.4 | 11.9 | 42.6 | 4.0 × |
| colisanans | | | | | | | 10⁻²⁵ |

Isolation and Genome-Scale Analysis of I. colisanans

[0310] To better understand the role I. colisanans in health and the pathogenesis of IBD we isolated two new isolates, termed I. colisanans MH27-1 and MH27-2 from healthy human donors by generating dilution-to-extinction enrichments and then plating for single colonies. I. colisanans MH27-1 and MH27-2 grew on TY and PYG based media and were typically observed as a Gram-variable staining coccus like cells (FIG. 2A).

[0311] Phylogenetic reconstruction of the Intestinicoccus genus using high-quality GenBank and RefSeq genomes from the NCBI and I. colisanans MH27-1 and MH27-2 revealed the isolates placed with high confidence within the I. colisanans clade, close to several uncultured species (FIG. 2B), and sister to the Acutalibacter genus. I. colisanans MH27-1 and I. colisanans MH27-2 are sugar fermenters, and are predicted to utilize a wide range of carbohydrate sources, notably starch, galactose, and mannose. Complete, or near complete biosynthetic pathways were identified for most amino acids except tryptophan, glycine, histidine, phenylalanine and tyrosine. Several pathways for the uptake and fermentation of amino acids (Arg, Asp, Cys, Met, Glu, Gln, Met, Ser, and Thr) were also identified, but are likely not primary sources of energy. Metabolic modelling of the I. colisanans MH27-1 and I. colisanans MH-27-2 isolates revealed that when fed with glucose and other hexose sugars, the primary by-product of fermentation was acetate. AntiSmash identified two RiPP sactipeptides BGCs in both strains with no close homology to BGCs in public databases. DeepBGC identified the same sactipeptides RiPP and a further seven putative BGCs with >1 coding region and >0.75 deepBGC score.

I. colisanans Enhances Gut Barrier Function

[0312] To assess the role of I. colisanans in the healthy gut, naive C57Bl/6 SPF mice were treated for 8 days with I. colisanans MH27-1 (FIG. 3A). During this treatment period, we did not observe any morbidity or change in general appearance, behaviour, posture, mobility and neurological behaviour. Similarly, there was no significant change in body weight in I. colisanans MH27-1 treated animals relative to the vehicle control and colon length and weight/length ratio were also unaffected (FIGS. 3B-D). I. colisanans MH27-1 did not result in any significant histological changes in the colon when compared to the vehicle as determined by assessing epithelial injury, inflammation and hypervascularization alone, or as a combined histopathological score (FIG. 3E-H).

[0313] The present inventors hypothesised that the big-data approach could be used to identify novel candidate live biotherapeutics for inflammatory bowel disease. We therefore tested the therapeutic efficacy of I. colisanans MH27-1 in an acute model of DSS induced murine colitis (FIG. 4A) as this is a well-documented model of epithelial injury and repair. DSS treatment resulted in significant disease activity relative to the vehicle control. There was a significant reduction in body weight (FIG. 4B) which has been shown to be an accurate and reliable indicator of colitis (Britto, 2019). As expected, prednisone exacerbated the DSS induced weight loss (Yamamoto, 2013), however DSS induced weight loss was ameliorated by treatment with I. colisanans MH27-1 or F. prausnitzii A2-165 (FIG. 4B). Endoscopic analysis revealed a progressive increase in disease activity in all treatment groups with F. prausnitzii A2-165 and I. colisanans MH27-1 but not prednisone resulting in lower disease activity at day 6 relative to the vehicle treatment group (FIG. 4C).

[0314] Histological analysis of DSS treated mice revealed significant gut damage characterised by crypt loss, epithelial erosion and ulceration. Notably, treatment with I. colisanans MH27-1 resulted in significant improvement in pathology characterised by crypt re-formation and re-epithelisation (FIG. 4D) as evidenced by improvements in histopathological healing (FIG. 4E) and epithelial injury (FIG. 4F). As expected, prednisone and F. prausnitzii A2-165 also resulted in a significant improvement in disease pathology.

[0315] The therapeutic efficacy of I. colisanans MH27-2 in an acute mouse model of DSS colitis was examined, with prednisone acting as a positive control drug. DSS treatment resulted in significant colitis, as evidenced by histopathological scoring of colon tissue damage and inflammation.

[0316] Histological evidence of colitis was ameliorated by daily treatment with I. colisanans MH27-2 or the positive control drug prednisone. Specifically, the total histological score of DSS-treated mice given daily treatment with I. colisanans MH27-2 was significantly lower compared to DSS control mice (FIG. 4G). This effect was also observed for each of the histological sub-scores, demonstrating that treatment with I. colisanans MH27-2 reduced both epithelial damage (FIG. 4H) and inflammation (FIG. 4I) in DSS-treated mice.

[0317] The therapeutic efficacy of I. colisanans MH27-2 drug substance (DS) in an acute mouse model of DSS colitis was examined, with minocycline and prednisone as positive controls. DSS treatment resulted in significant colitis, as evidenced by both in vivo colitis measurements (disease activity index, body weight, fecal occult blood) and histopathological damage to the colon tissue (histology scores and sub-scores).

[0318] Disease activity index was significantly ameliorated (p<0.05) by daily treatment with I. colisanans MH27-2 DS at a dose of 2×10\hat{ }6 cells per day (FIG. 4J), or by the positive control minocycline. Specifically, the disease activity index sub-scores of body weight change (FIG. 4K) and fecal occult blood (FIG. 4L) were improved by daily treatment with I. colisanans DS or minocycline. Total histopathological scores were significantly improved in DSS-treated mice given daily treatment with either minocycline or I. colisanans MH27-2 DS at a dose of 2×10\hat{ }8 cells per day (FIG. 4M). This therapeutic effect was characterized by improvements in mucosal architecture scores (FIG. 4N), erosion/ulceration scores (FIG. 4O) and percent involvement scores (FIG. 4P).

[0319] The IL-23-Th17 cell immune axis is central to the pathogenesis of inflammatory bowel disease and is a validated therapeutic target (Friedrich, 2019). As the DSS model of murine colitis is largely underpinned by Th1 polarised immunity (Yang, 2017) we also tested the therapeutic efficacy of I. colisanans MH27-1 in the murine SKG model. SKG mice carry a mutation in the ZAP-70 gene and develop IL-23 driven Crohn's like ileitis and autoimmune inflammatory arthritis following disease initiation with curdlan treatment (FIG. 5A) (see, Benham, 2014). Histological analysis of vehicle treated mice revealed significant gut damage characterised by infiltration of inflammatory cells and granuloma formation 7 days after curdlan treatment. As expected, treatment with the anti-IL-23 monoclonal antibody resulted in a significant reduction in histological damage. Treatment with I. colisanans MH27-1 also resulted in significant improvement in pathology as evidenced by improvements in the histopathological score (FIG. 5B). Similarly, treatment with I. colisanans MH27-1 also resulted in significant reduction in the production of cytokines central to disease pathogenesis including IL-6 and IL-12 (IL-12p70) (FIG. 5C, D).

[0320] The therapeutic efficacy of I. colisanans MH27-2 in an acute murine model of TNBS-induced colitis was also examined, with cyclosporine A as a positive control (FIG. 5E). The TNBS model is widely used as it shares immunopathologies with Crohn's disease. TNBS treatment resulted in significant macroscopic damage that was ameliorated by treatment with cyclosporine A or I. colisanans MH27-2 (FIG. 5F). Notably, I. colisanans MH27-2 showed significant (p<0.05) improvement in the ulcers/inflammation score (FIG. 5G). TNBS treatment resulted in significant histological damage that was ameliorated by treatment with cyclosporine A or I. colisanans MH27-2 (FIG. 5H). The colitis lesions including diffuse mucosal architectural abnormalities, ulceration, crypt dilation, aberrant crypts, crypt loss, distortion of mucosal glands, goblet cell loss and focal to multifocal inflammatory cell infiltration were less pronounced in I. colisanans MH27-2 compared to the vehicle group and the lesion scores were significantly (p<0.05) reduced in the treatment groups as reflected by improvements in the individual extent of inflammation, erosion or ulceration, epithelial regeneration and percent involvement scores (FIG. 5I-L). Treatment with I. colisanans MH27-2 resulted in significant reduction in IL-6 concentration when compared to the vehicle treated TNBS control (FIG. 5M).

[0321] Taken together, these data revealed that I. colisanans MH27-1 did not cause any adverse effects in DSS treated or naïve mice, and that I. colisanans MH27-1 and 2 promoted mucosal healing in DSS or TNBS treated C57Bl/6, and SKG mice.

I. colisanans Suppresses IL-6 Mediated Activation of STAT3.

[0322] Increased levels of the pro-inflammatory cytokine IL-6 and signalling via its receptor IL-6R is associated with IBD pathogenesis. Notably, IL-6 contributes to chronic inflammation in the gut due to its pro-inflammatory and anti-apoptotic effects on immune cells. These effects are mediated by IL-6 receptor binding which causes JAK kinase activation and STAT3 dimerization in combination with activation of MAPK/ERK and other downstream kinases. Here, we examined whether I. colisanans MH27-1 and MH27-2 can suppress IL-6 classical and trans signalling mediated activation of STAT3 using the HEK-Blue™ IL-6 reporter cell line. The HEK-Blue™ IL-6 reporter cell line constitutively expresses the human IL-6 receptor and binding of IL-6 to the receptor triggers expression of a STAT3-responsive SEAP reporter. Tofacitinib was used as a control, and as expected, IL-6 and IL-6/IL-6R mediated activation of STAT3 was fully prevented by tofacitinib (FIG. 6). It is demonstrated that I. colisanans MH27-1, MH27-2 and MH27-3 raw culture supernatant and its <3 kDa filtered fraction significantly suppressed SEAP reporter activity (FIG. 6AC) with I. colisanans MH27-4 and MH27-5 raw culture supernatant also suppressing SEAP reporter activity relative to the medium (Figure DE). In contrast, R. bromii MCB950 raw culture supernatant and its <3 kDa filtered fraction did not significantly suppress SEAP reporter activity (FIG. 6F). Additionally, I. colisanans MH27-2 suppressed IL-6 trans signalling mediated activation of STAT3 (FIG. 6G).

I. colisanans Promotes the Migration of Human Intestinal Epithelial Cells.

[0323] Damage of the intestinal barrier commonly occurs in IBD. The rapid migration of intestinal epithelial cells is a crucial component of the wound healing process to re-establish homeostasis. To determine whether I. colisanans MH27-1 or MH27-2 can affect the motility of intestinal epithelial cells, a Transwell® migration assay was employed. HCT116 cells were seeded apically in a Transwell® chamber and the ability of I. colisanans extract to promote migration to the basolateral side of the chamber was assessed. Untreated cells had a basal level of migration to the basolateral side of the membrane, and this was unaffected by treatment with TY medium or the gut bacterium Clostridium bolteae BAA-613 (FIG. 7A). I. colisanans MH27-1 and MH27-2 significantly promoted the migration of HCT116 cells to the basolateral side (FIG. 7A).

[0324] The pro-migratory effects of I. colisanans were further confirmed using the IncuCyte scratch wound assay. After induction of a scratch wound, HCT116 cells showed an accelerated rate of wound closure in the presence of extract from I. colisanans MH27-2 compared to the control cells treated with medium (FIG. 7B).

I. colisanans MH27 Suppresses IL-23 Mediated Activation of STAT3.

[0325] The present inventors next sought to investigate whether bacterial products naturally produced by the gut bacterium I. colisanans MH27, can modulate IL-23 mediated activation of STAT3. The JAK-STAT immune axis is a recognised and validated drug target for IBD (Salas et al., 2020) and other diseases (McLornan et al., 2021) with JAK-STAT pathway signalling targeted by several approved IBD therapeutics including anti-IL-23 antibodies (e.g., Ustekinumab) and small molecule inhibitors (e.g., tofacitinib) (Hu et al., 2021). As STAT3 suppression can reduce damaging inflammation, I. colisanans MH27 and/or its bioactives could potentially be used as novel immunoregulatory therapies for IBD and other diseases. The present inventors therefore examined whether I. colisanans MH27 can suppress IL-23-mediated activation of STAT3 using the HEK-Blue™ IL-23 reporter cell line. The HEK-Blue™ IL-23 reporter cell line constitutively expresses the human IL-23 receptor and binding of IL-23 to the receptor triggers expression of a STAT3-responsive SEAP reporter. The pharmacological JAK-STAT inhibitor, tofacitinib, was used as a control.

[0326] As expected, IL-23 mediated activation of STAT3 was fully prevented by tofacitinib (FIG. 8). I. colisanans MH27 cell-free culture supernatant and <3 kDa filtered culture supernatant significantly suppressed SEAP reporter activity, relative to the TY medium controls. In contrast, neither raw nor <3 kDa filtered supernatants prepared from Ruminococcus bromii MCB950 suppressed SEAP reporter activity, relative to the MCM medium controls (FIG. 8, right-hand graph).

[0327] These data demonstrate that the secretome of I. colisanans MH27, but not R. bromii MCB950, can suppress the IL-23/STAT3 signalling axis in vitro. Based on fractionation of the culture supernatant, the suppressive effects on STAT3 activation are likely mediated by one or more secreted low molecular weight bioactive(s).

I. colisanans Ameliorates IFNγ-Driven Reduction in Gut Barrier Integrity.

[0328] The ability of I. colisanans MH27 culture supernatant to modulate barrier function was examined using T84 cells. A basolateral treatment with IFNγ was used to disrupt barrier function. Following addition of IFNγ to T84 cells for 48 hours, there was a large drop in resistance indicating an increase in barrier permeability. Treatment with <3 kDa fractionated culture supernatant from I. colisanans MH27 ameliorated the reduction in TEER relative to the YG/V medium control most notably after 168 hours (FIG. 9, p<0.05 at 168, 192, 216, 240, 288, 312 and 336 hours as assessed by two-way ANOVA test).

[0329] I. colisanans ameliorates IL-6-driven reduction in gut barrier integrity.

[0330] The ability of I. colisanans MH27-2 to modulate barrier function was examined by monitoring the TEER of T84 cells during and after inducing barrier integrity loss by the known barrier disruptor IL-6. The T84 cells were treated with IL-6 for 96 hours and, as expected, a significant drop in TEER could be observed indicating an increase in barrier permeability. Concurrent treatment with I. colisanans MH27-2 culture supernatant extract ameliorated the IL-6 mediated reduction in TEER in a dose dependent manner (FIG. 10).

I. colisanans Ameliorates IFNγ-Mediated Reduction of ZO1 Expression.

[0331] Tight junctions (TJs) form a continuous barrier between epithelial cells and act to control paracellular permeability. ZO1 plays a key role in tight junction assembly and we therefore assessed the ability of I. colisanans MH27 supernatant extract to mitigate IFNγ-mediated loss of ZO1 expression in T84 cells. Stimulation with IFNγ caused a marked reduction in ZO1 expression (FIG. 11). Pre-treatment with YG/V extract did not significantly affect the reduction in ZO1 expression (FIG. 11). In contrast, pre-treatment with I. colisanans MH27-1, MH27-2, and MH27-3 supernatant extract amelioratered the IFNγ induced reduction in ZO1 expression (FIG. 11).

I. colisanans Produces Metabolites that Modulate Gut Barrier Integrity.

[0332] Based on the ability of I. colisanans supernatant extract to modulate ZO1 expression, we next examined the ability of Strata X-100 derived fractions of I. colisanans MH27-2 culture supernatant to modulate ZO1 expression. By this approach, we determined that the ability to modulate ZO1 expression could be fractionated and was localised to the 15- and 30% fractions (FIG. 12A-C).

### Metabolites Produced by I. colisanans MH27 Ameliorates IFNγ-Mediated Reduction of ZO1 Expression

[0333] Based on these data, the present inventors hypothesised that I. colisanans produces metabolites that modulate inflammatory responses and barrier integrity in gut epithelial cells. Thirty metabolites (classified as Level 1 or 2a) were identified in the cell free culture supernatant that were 1.5-fold increase relative to the YG/V medium control (Table 4). These included metabolites previously reported to modulate inflammation, immune cell infiltration, oxidative stress and barrier function (e.g., ornithine, indole-3-lactic acid, allopurinol, propionylcarnitine, pyrogallol, 3-(2-Hydroxyethyl)indole, and N-acetyl-cysteine, amongst others). A further 29 and 48 metabolites in the 15 and 30% fractions respectively that were ≥1.5-fold increased relative to the YG/V medium control (Table 4). These included metabolites previously shown to modulate inflammation and barrier integrity (e.g., tryptophol, indole-3-lactic acid, indole-3 propionic acid, cyclo(-Phe-Pro)). The immunomodulatory metabolite indole-3-acrylic acid was also identified in the 60% fraction. Note that some identified metabolites were not present in the control samples, and as such, a fold-change could not be calculated.

[0334] Having identified candidate gut barrier modulating metabolites, the present inventors next assessed the ability of select metabolites to modulate IFNγ-mediated loss of ZO1 expression in T84 cells. For this, T84 cells were pre-treated with ornithine, indole-3-acrylic acid (IAyA), or indole-3-proprionic acid (IPA) for 18 hours prior to stimulation with IFNγ for 48 hours. As previously observed, stimulation with IFNγ caused a marked reduction in ZO1 expression (FIG. 13A, B). Pre-treatment with ornithine, IAyA and IPA all significantly ameliorated the IFNγ-induced reduction in ZO1 expression (FIG. 13A, B). Separately, we also determined that cyclo(-Phe-Pro) suppressed IL-23 mediated activation of STAT3 (FIG. 13C).

TABLE 4
METABOLITES IDENTIFIED IN SUPERNATANT
(SN), 15%, AND 30% FRACTIONS

| | | Fold |
|---|---|---|
| Compound Name | Sample | change |
| Ornithine | SN | 3350.085 |
| N-Acetyl-glutamic acid | SN | 396.0299 |
| NAD+ | SN | 44.60856 |
| Succinic acid | SN | 42.68632 |
| Indole-3-lactic acid | SN | 27.72202 |
| Glutamine | SN | 16.17975 |
| Acetylhistidine | SN | 13.76723 |
| Creatinine | SN | 13.56073 |
| cis-Aconitic acid | SN | 7.736506 |
| 4-Hydroxy-2,5-dimethyl-3(2H)-furanone | SN | 7.589326 |
| 3-(3-Hydroxyphenyl)propionic acid/3-Phenyllactic acid/ | SN | 5.795158 |
| Acetovanillone/Ethyl vanillin | | |
| Homocysteine | SN | 5.53619 |
| N-Iso valerylglycine | SN | 3.820155 |
| Allopurinol | SN | 3.812495 |
| Propionylcarnitine | SN | 3.552227 |
| Crotonic acid | SN | 3.302462 |
| Pyrogallol | SN | 3.283553 |
| Inosine | SN | 3.255816 |
| N-Acetyl-tyrosine | SN | 2.713173 |
| 3-(2-Hydroxyethyl)indole | SN | 2.495905 |
| Riboflavin | SN | 2.41997 |
| N-Acetyl-phenylalanine | SN | 2.389627 |
| Dulcitol/Mannitol/Sorbitol | SN | 2.118445 |
| N-Acetyl-cysteine | SN | 1.924865 |
| N-Acetyl-methionine | SN | 1.923017 |
| Thymidine | SN | 1.847273 |
| N-Acetyl-lysine | SN | 1.771331 |
| N-Acetyl-tryptophan | SN | 1.760654 |
| Thymine | SN | 1.646492 |
| N-Acetyl-arginine | SN | 1.625908 |
| N-Caffeoylputrescine | 15% | — |
| 4-(2-oxo-3-hydrobenzoxazol-3-yl)-7,8- | 15% | 18.2 |
| dioxabicyclo[3.2.1]octan-2-one/maclurin | | |
| Chrysophanic acid | 15% | 12.8 |
| Cyclo-[L-(4-hydroxy-Pro)-L-leu]/Pyrrolo[1,2-a]pyrazine-1,4- | 15% | 10.7 |
| dione, hexahydro-3-(1-methylethyl) | | |
| Indole-3-lactic acid | 15% | 6.5 |
| GABA-C6:0 | 15% | 5 |
| Riboflavin | 15% | 4 |
| Tridecanedioic acid/Brassylic acid | 15% | 3.7 |
| 4-Hydroxymellein | 15% | 3.5 |
| N-Acetyl-L-tryptophan | 15% | 3.3 |
| Phe-Pro | 15% | 3 |
| Pterosin G | 15% | 2.8 |
| Gly-Phe | 15% | 2.7 |
| Tyramine | 15% | 2.6 |
| Cyclo(L-Val-L-Pro) | 15% | 2.5 |
| Tyr-Pro-Phe | 15% | 2.5 |
| L-Alanyl-L-norleucine/Cyclo-(Ala-Leu)/Cyclo-(Ala-4-hydroxy- | 15% | 2.2 |
| Pro) | | |
| Chelerythrine | 15% | 2.2 |
| L-Prolyl-L-isoleucine | 15% | 1.9 |
| Decanedioic acid/4-oxodecanedioate | 15% | 1.9 |
| Val-Ile | 15% | 1.8 |
| Phe-C4:0 | 15% | 1.8 |
| Diphenamid | 15% | 1.7 |
| Phenylalanine | 15% | 1.6 |
| N-Aceyl-L-tyrosine | 15% | 1.6 |
| Traumatic Acid/Butanedioic acid, 2-(4,4-dimethyl-2- | 15% | 1.6 |
| methylenepentyl) | | |
| 1-Hydroxyphenazine | 15% | 1.5 |
| 3-oxo-4-hydroquinoxaline-2-carboxylic acid/2,4- | 15% | 1.5 |
| Dichlorobenzoate | | |
| N-Acetyl-L-phenylalanine | 15% | 1.5 |
| Indole-3-propionic acid | 30% | — |
| Bisphenol A | 30% | — |
| 2-(2-acetyl-3,5-dihydroxyphenyl)acetate | 30% | — |
| Lidocaine N-Oxide | 30% | — |
| 3-(3,4,5-Trimethoxyphenyl)propanoic acid | 30% | — |
| Butanenitrile, 2-(beta-D-glucopyranosyloxy)-2-methyl-/ | 30% | — |
| Prunetin/Lotaustralin | | |
| PC(0:0/16:0) | 30% | — |
| Tryptophol | 30% | — |
| (3S,6R,9S,12R,15S,18R)-4,10,16-Trimethyl-3,6,9,12,15,18- | 30% | 130.5 |
| hexa(propan-2-yl)-1,7,13-trioxa-4,10,16-triazacyclooctadecane- | | |
| 2,5,8,11,14,17-hexone | | |
| 3-Phenyl-2-pyrrolylpropanoic acid | 30% | 102.4 |
| 2-[[2-(Diethylamino)acetyl]amino]-3-methylbenzoic acid/Ile- | 30% | 82 |
| Met | | |
| N-[1-carbamoyl-2-(4-hydroxyphenyl)ethyl]acetamide/Acetyl- | 30% | 43.7 |
| tyrosine | | |
| Gly-Ile/Leu-Gly/GABA-C5:0 | 30% | 41.2 |
| 2-Aminoanthraquinone | 30% | 31 |
| Methyl jasmonate | 30% | 22.6 |
| 2-Hydroxyoctanoic acid | 30% | 20.5 |
| (2-(4,4-Dimethyl-4,5-dihydrooxazol-2-yl)-5- | 30% | 16.6 |
| fluorophenyl)(phenyl)methanol | | |
| Etilefrine/N-Phenyldiethanolamine | 30% | 15.8 |
| Plumericin/Isoplumericin | 30% | 12.4 |
| Phe-C7:0/PyroGlu-Phe | 30% | 11.8 |
| Leu-C8:0/GABA-C10:0 | 30% | 10.8 |
| Isopentenyladenine | 30% | 10.2 |
| Isopentenyladenine | 30% | 7.9 |
| Curcumol/Palmitelaidic acid | 30% | 7.5 |
| 6-amino-1-phenyl-1,3-dihydropyrimidine-2,4-dione | 30% | 7 |
| 3-Hydroxycapric acid/10-Hydroxydecanoic acid | 30% | 6.4 |
| (1r,5R,7S)-5,7-Diethyl-2-(1-ethyl-2-methyl-1H-indol-3-yl)-1,3- | 30% | 5.8 |
| diazaadamantan-6-one | | |
| L-Kynurenine/Phenylalanine/2-Amino-1-phenylethanol/Indoline | 30% | 5.7 |
| 6,9-Dimethyl-3,4,5,3a,9b-pentahydrocyclopenta[1,2- | 30% | 5 |
| c]quinoline-4-carboxylic acid | | |
| 4-Methoxycinnamic acid/Mellein/2-Propenoic acid, 3-(4- | 30% | 4.5 |
| methoxyphenyl)-/3-Methoxycinnamic acid | | |
| (10E,15E)-9,12,13-Trihydroxyoctadeca-10,15-dienoic acid | 30% | 4.5 |
| Carveol | 30% | 4.1 |
| Zalcitabine | 30% | 4.1 |
| 10-Hydroxydecanoate/Citronellic acid | 30% | 3.9 |
| (3S,6R,6aS,7S)-6,6a,7,8-Tetrahydroxy-3-methyl- | 30% | 3.9 |
| 3,4,5,6,7,12a-hexahydro-2H-benzo[a]anthracene-1,12- | | |
| dione/Nifenazone/methyl 2-ethyl-4-[(3R,4R,5S)-5-hydroxy-4,5- | | |
| dimethyl-2-oxooxolan-3-yl]-2-methyl-3-oxobutanoate | | |
| Linalool/Geraniol | 30% | 3.6 |
| Traumatic Acid | 30% | 3.1 |
| FA 9:1 + 1O | 30% | 3 |
| Milrinone | 30% | 3 |
| Lenacil | 30% | 2.9 |
| Methylethyl (2E)-3-(3,5-dimethoxyphenyl)-2-cyanoprop-2- | 30% | 2.8 |
| enoate | | |
| Pyridoxine | 30% | 2.7 |
| 2,4,5-trimethoxybenzoic acid/Mescaline | 30% | 2.7 |
| Phe-Pro/cyclo(-Phe-Pro) | 30% | 2.4 |
| 3-Hydroxy-beta-lapachone | 30% | 2 |
| Cyclo-(Asn-Leu) | 30% | 1.9 |
| (10E,15E)-9,12,13-Trihydroxyoctadeca-10,15-dienoic | 30% | 1.7 |
| acid/14(Z)-Eicosenoic acid/FA 18:4 + 1O | | |
| 9-OxoOTrE/2H-Pyran-2-one, tetrahydro-4-hydroxy-6-[2- | 30% | 1.6 |
| (1,2,4a,5,6,7,8,8a-octahydro-2-methyl-1-naphthalenyl)ethyl]- | | |
| 2-Methoxycinnamaldehyde | 30% | 1.5 |

I. colisanans Exhibits Anti-Inflammatory IL-10/IL-12 Cytokine Ratio

[0335] Previous studies have shown that the ability of bacteria to induce secretion of IL-10 and IL-12 from PBMCs in vitro correlates with their in vivo immunomodulatory capacity (Foligne et al., 2007; and Sokol et al., 2008). In particular, the IL-10:IL-12 ratio is widely used to differentiate between strains showing an anti-inflammatory (high IL-10:IL-12 ratio) or proinflammatory (low IL-10:IL-12 ratio) with a mean IL-10:IL-12 ratio >5 correlating with protection against TNBS-induced experimental colitis. The ability of I. colisanans to induce cytokine production from PBMCs was therefore assessed.

[0336] Treatment with I. colisanans resulted in an IL-10:IL-12 ratio of 30 (FIG. 14) which further demonstrates the strong anti-inflammatory activity observed in the above data.

I. colisanans Exhibits NF-κB Suppressive Activity

[0337] The NF-κB signalling axis plays a key role in the pathogenesis of inflammatory bowel disease (IBD) and it is a recognised and validated therapeutic target. We show that I. colisanans MH27-2, MH27-3 and MH27-5 cell free culture supernatant and <3 kDa filtered culture supernatant significantly suppressed luciferase reporter activity, relative to the medium controls. In contrast, raw supernatant prepared from R. bromii MCB950 suppressed reporter activity, relative to the medium controls (FIG. 15A,D).

### Materials & Methods

### Bacterial Strains, Culture Conditions and Analyses.

[0338] Stool samples were collected from healthy human adults with no history of gastrointestinal disorders and mixed with an equal weight per volume of sterile oxygen free glycerol solution (McSweeny, 2005). Donors had not consumed antibiotics in the 3 months prior to collection of the faecal samples. All samples were collected following informed consent and the ethical guidelines approved by Bellberry Limited (HREC2018-05-400-A-6). I. colisanans and Faecalibacterium prausnitzii were routinely processed in a Coy vinyl anaerobic chamber with an oxygen free atmosphere (85% N₂:10% CO₂:5% H₂) atmosphere. I. colisanans was routinely cultured in TY or YG/V medium (Table 1) while F. prausnitzii was cultured in TY medium (Table 1). All isolates were stocked by mixing 3 mL of actively growing culture with an equal volume of glycerol solution and storing at −80° C.

Isolation of I. colisanans.

[0339] An isolate of I. colisanans was produced by inoculating a donor faecal sample with I. colisanans present at a relative abundance of 0.37% into custom medium (Trehalose 1 g/L, Alanine 400 mg/L, Tryptophan 80 mg/L, Methionine 200 mg/L, Phenylalanine 200 mg/L, Tyrosine 200 mg/L, Butyric acid 400 μL/L, Salts 2 75 ml/L, Salts 3 75 ml/L, Sodium bicarbonate 8 g/L, Resazurin 1 mL/L, Cysteine hydrochloride 1 mL/L, Vitamin solution 1 ml/L) and then serially diluting to extinction. The dilution-to-extinction culture series was sequenced and a low diversity enrichment culture with I. colisanans at a relative abundance of 77% was identified. This enrichment culture was then used to establish a further dilution-to-extinction culture series and a low diversity enrichment with I. colisanans at over 79% was identified. Colonies were recovered on PYG agar and subsequently picked into PYG broth. From this, a bi-culture comprised of I. colisanans and Ruthenibacterium lactatiformans was identified. To produce an axenic culture of I. colisanans, the bi-culture was inoculated into YCFAmod broth and the enrichment culture was then streaked onto YCFAmod agar. Two distinct colony types were observed after several days, and these were purified. By this approach, a Gram-variable staining coccoid isolate was identified and termed I. colisanans MH27-1 following whole genome sequencing.

[0340] The isolate of I. colisanans MH27-2 was produced by inoculating a donor faecal sample with I. colisanans present at a relative abundance of 0.38% into custom medium (Maltose 1 g/L, Alanine 400 mg/L, Tryptophan 80 mg/L, Methionine 200 mg/L, Phenylalanine 200 mg/L, Tyrosine 200 mg/L, Histidine 125 mg/L, Salts 2 75 ml/L, Salts 3 75 ml/L, Sodium bicarbonate 8 g/L, Resazurin 1 mL/L, Cysteine hydrochloride 1 mL/L, Vitamin solution 1 ml/L) and then serially diluting to extinction. The dilution-to-extinction culture series was sequenced and an enrichment with I. colisanans at a relative abundance of 72.6% was identified. The enrichment was streaked on a PYG plate and an isolate with a coccoid cell morphology was identified. Following purification, a Gram-variable staining coccoid isolate was identified and termed I. colisanans MH27-2 following whole genome sequencing.

[0341] The isolate of I. colisanans MH27-3 was produced by inoculating a donor faecal sample with I. colisanans present at a relative abundance of 0.38% into custom medium (Maltose 1 g/L, Alanine 400 mg/L, Tryptophan 80 mg/L, Methionine 200 mg/L, Phenylalanine 200 mg/L, Tyrosine 200 mg/L, Histidine 125 mg/L, Salts 2 75 ml/L, Salts 3 75 ml/L, Sodium bicarbonate 8 g/L, Resazurin 1 mL/L, Cysteine hydrochloride 1 mL/L, Vitamin solution 1 ml/L) and then serially diluting to extinction. The dilution-to-extinction culture series was sequenced and an enrichment with I. colisanans at a relative abundance of 14.5% was identified. This enrichment was used to inoculate a second dilution-to-extinction experiment in the same GDI medium resulting in a new 28% enrichment of I. colisanans and other bacterial species at <27% relative abundance. The enrichment was plated on YG/V and a single colony comprised of Gram-variable staining coccoid cells was identified. The colony was picked and streaked twice more on YG/V agar. The axenic isolate was termed I. colisanans MH27-3 following whole genome sequencing.

[0342] I. colisanans MH27-4, MH27-5 and MH27-6 were produced from donor faecal samples using a microbial based single cell sorting approach. For I. colisanans MH27-4, approximately 1 g of a faecal sample with I. colisanans at 0.3% relative abundance was mixed with 1 mL of anaerobic buffered diluent solution and vortexed for 10 seconds to dissociate bacteria from faecal debris. For I. colisanans MH27-5, approximately 1 g of a faecal sample with I. colisanans at 0.67% relative abundance was mixed with 1 mL of anaerobic buffered diluent solution and vortexed for 10 seconds to dissociate bacteria from faecal debris. For I. colisanans MH27-6, approximately 1 g of a faecal sample with I. colisanans at 2.5% relative abundance was mixed with 1 mL of anaerobic buffered diluent and vortexed for 10 seconds to dissociate bacteria from faecal debris. Ruminococcus bromii MCB950 was similarly produced from donor faecal samples using a microbial based single cell sorting approach and used for comparative analyses. For R. bromii MCB950, approximately 1 g of a faecal sample with R. bromii at 5.5% relative abundance was mixed with 1 mL of anaerobic buffered diluent solution and vortexed for 10 seconds to dissociate bacteria from faecal debris. Bacterial cells were sorted using a BD FACSAria™ Fusion Flow Cytometer with a 100 μm nozzle and small particle detector according to the manufacturer's instruction. The system was pressurised at 20 psi and events were triggered on scatter with thresholds set using 0.2 μm filtered PBS which allowed a few events from the noise floor. Bacterial cells were also sorted using the CytoFLEX SRT Benchtop Cell Sorter inside a COY anaerobic chamber. The instrument was set up and quality controlled according to manufacturer's instructions. Dry ice was included inside the anaerobic chamber to keep the instrument within a set temperature range. The sheath of the Fusion and SRT was sparged with nitrogen gas for one hour prior to sorting. To sort bacterial cells, an aliquot was filtered through a 40 μm filter and a 10-3 dilution of the filtrate was subsequently prepared using a 0.2 μm filtered anaerobic buffered diluent solution (i.e., 38 ml/L each of salt solutions 2 & 3 (McSweeney et al., 2005)). The diluted filtrate was run to determine the dilution resulting in 500-1200 events per second. Targets were gated on scatter and doublets were excluded (FIG. 16). Single cells were deposited onto TY agar plates and incubated at 37° C. for up to 3 weeks. Isolates were identified by whole genome sequencing following growth in TY broth. By this approach, isolates affiliated with I. colisanans and R. bromii were tentatively identified. The I. colisanans isolates were purified by repeated streaking of single colonies on YG/V agar and the R. bromii were purified by repeated streaking of single colonies on TY agar. The final purified isolates were glycerol stocked and submitted for whole genome sequencing and by this approach isolates termed I. colisanans MH27-4 and MH27-5 were produced.

[0343] For I. colisanans MH27-6, following growth of the cell sorted isolates in TY broth, an enrichment containing I. colisanans MH27-6 at a relative abundance of 10.6% was identified. From a glycerol stock of this enrichment, 200 μl was used to inoculate YG/V medium and I. colisanans was enriched to 71.5% relative abundance. I. colisanans colonies were produced and subsequently purified by streaking on YG/V agar. The final purified isolate was glycerol stocked and submitted for whole genome sequencing and by this approach an isolate termed I. colisanans MH27-6 was produced.

### Metabolic Reconstruction.

[0344] Protein coding sequences were predicted and annotated using the annotate function in enrichM (0.6.2). Briefly, enrichM identifies protein coding sequences using prodigal (version) in −p meta mode. The amino acid sequences are then searched against the UniRef100 database (version) using DIAMOND (version), and E.C., TCDB and eggnog classifications are inherited from the id mapping file distributed with UniRef. Hmmer hmmsearches (version 3.1b2) against Pfam (release 33.0), TIGRFAM (release 15.0) and dbCAN2 (downloaded September 2019) were used to annotate functional domains, key metabolic markers and carbohydrate activate (CAZy) enzymes, respectively. Metabolic pathways were identified using the classify function in enrichM, which assesses annotations and their genomic position against manually defined metabolic pathway definitions. A pathway is considered present in a genome if it encoded >80% of the required proteins and passes all required synteny checks. These automatically predicted pathways were then manually assessed. In addition, gutSMASH (version 1.0.0) was applied to identify common functions mediated by gut microbiomes.

### Phyloaenetic Trees.

[0345] Clade 23560 in the species representative tree of GTDB r89 was visualised using the R libraries phytools (v0.7.70), ape (v5.4) and ggtree (v2.2.4). A separate genome tree was constructed from high quality genomes (≥90%, contamination and ≤55% contamination from checkM analysis) within the Intestinococcus genus (NCBI r89) and the MH27 isolate. For each genome, a set of 122 bacteria-specific conserved marker genes were extracted from each genome using gtdbtk identify. These genes were the aligned to profile HMMs and concatenated to a single alignment with gtdbtk align, and a Maximum likelihood phylogenetic tree was constructed from the alignments using FastTree (v2.1.10) with gtdbtk infer. Non-parametric bootstrap values were inferred using GenomeTreetk (v0.1.6) from 1000 repetitions.

### Preparation of Bacterial Strains for Animal Experimentation.

[0346] I. colisanans strains were grown to early stationary phase in PYG or YG/V. F. prausnitzii was grown in TY medium. The cell density of the individual cultures was calculated using a Helber Counting Chamber. To prepare the bacterial gavage solutions, individual cultures were centrifuged under a layer of sterile heavy mineral oil at 5,000 g for 10 minutes and the cell-free supernatant was then discarded. The cell pellets were washed in 1.5 ml of sterile anaerobic buffered diluent (38 ml/L each of salt solutions 2 & 3 (McSweeney, 2005), 1 ml/L of 0.1% (w/v) resazurin solution, 1 g/L L-cysteine) and then centrifuged again. Finally, the washed cell pellet was resuspended in half strength glycerol solution (15% v/v glycerol solution in anoxic buffered diluent) to a final concentration of 1×10⁹ cells/ml, aliquoted and frozen at −80° C. until required. The viability of the cell preparations was confirmed by thawing a single aliquot and streaking on an agar plate. The identity and purity of the individual strain preparations was confirmed by whole genome sequencing.

### Acute Model of DSS Induced Colitis.

[0347] For the prophylactic model, six-week-old C57BL/6 female mice purchased from Animal Resources Centres (Western Australia, Australia) were randomised and then co-housed for 7 days prior to experimentation. To induce disease, mice were treated with 3.5% DSS ad libiteum in the drinking water for 6 days. Naïve age matched control mice were processed and received DSS free drinking water. All treatments started 1 day prior to provision of DSS and all mice were sacrificed 2 days after the final DSS treatment. For the treatments, mice were anesthetised with isofluorane and orally gavaged with 200 μL of bacterial preparations or vehicle control. Prednisone (2 mg/kg) was administered following anesthetisation by intraperitoneal injection. Body weights and stool consistency were recorded daily. Stool samples were collected daily. Following sacrifice, the colon, liver and spleen were collected for analysis. Blood was collected by cardiac puncture.

[0348] For the therapeutic model, groups of 10 or 20 female C57BL/6 mice were used. All animals, except those in the healthy group, were given 2.5% dextran sodium sulfate (DSS) in the drinking water for 6 days total (Day 0 to Day 5). DSS was then withdrawn and replaced with normal drinking water for a further 5 days (Day 6 to Day 10). For the treatments, mice were given once daily oral gavage of 200 μL of I. colisanans MH27-2 at a dose of 2×10\hat{ }8 viable cells per day, or vehicle consisting of sterile glycerol and phosphate buffered salt solution. The positive control drug prednisone was similarly administered via oral gavage at a dose of 2 mg/kg per day. Treatments started on Day 4 and were given for 7 consecutive days until Day 10. Animals were sacrificed on Day 10 approximately 4 hours after the final treatment. Colon was harvested, rinsed, weighed, photographed, cut longitudinally. Colon tissue was fixed in 4% formalin and kept in 70% ethanol for histopathology using the Swiss-roll method.

### Endoscopic and Histological Scoring.

[0349] Animals were examined with a small animal gastrointestinal endoscope (Karl Storz Endoskope, Tuttlingen, Germany) on days −1, 2 and 6 to assess the extent of colon mucosal inflammation (Marks, 2015; and Liu, 2019). Briefly, mice were anesthetised with isoflurane and a colonoscope was inserted through the rectum. Images captured by high-definition videos were examined in a blinded manner to assess the presence and extent of disease pathologies (Table 5). Histological scoring was performed essentially as described by Marks et al. (Marks, 2015). Briefly, samples were fixed in 4% formalin, paraffin embedded and sectioned. Tissue sections were hematoxylin and eosin stained to assess disease pathology and with Alcian blue to assess mucin production. Slides were imaged using the Aperio digital imaging system (Leica Biosystems, NuBloch, Germany). To grade colitis severity, the extent of inflammation and epithelial injury in the tissue sections were graded semi-quantitatively using an established scoring system (Table 6). The samples were then randomised and subsequently scored in a blinded by a trained gastrointestinal pathologist.

### SKG Model of Murine Ileitis.

[0350] Five-week-old SKG female mice (n=3 male; n=3 female) were randomised and then co-housed for 3 weeks prior to experimentation. To induce disease, mice were administered curdlan (1,3-β-glucan, 3 mg per mouse) intraperitoneal (i.p.). Naïve age matched control mice were similarly processed except that they were administered saline i.p. All treatments started prior to administration of curdlan, and all mice were sacrificed 7 days after the curdlan treatment. For the bacterial treatments, mice were orally gavaged with 200 μl of bacterial preparations or vehicle control starting 2 days prior to the curdlan administration. Anti-mouse IL-23 p19 monoclonal antibody (Thermo Fisher, 30 μg per mouse) was administered by i.p. injection one day prior to curdlan administration. Stool samples were collected daily. Body weights were measured at Day −2. 0 and 7. Following sacrifice, the colon, distal small intestine, mesenteric lymph nodes and spleen were collected for analysis. Blood was collected by cardiac puncture.

### Clinical and Histological Scoring.

[0351] Histological scoring was performed essentially as described by Benham et al. 2014. Briefly, samples were fixed in 4% formalin, paraffin embedded and sectioned. Tissue sections were hematoxylin and eosin stained to assess disease pathology and with Alcian blue for goblet cell assessment. Slides were imaged using an Olympus VS120 slide scanner (Olympus Corporation, Tokyo, Japan). To grade ileitis severity, the extent of inflammation and epithelial injury in the tissue sections were graded semi-quantitatively using an established scoring system (Table 7) (Benham et al., 2014). The samples were then randomised and subsequently scored in a blinded manner by an independent trained pathologist.

[0352] To characterise the cytokines present in serum, the mice were euthanised by CO₂ asphyxiation after which blood was collected by cardiac bleed and serum isolated by centrifugation. Serum samples were stored at −80° C. These serum samples were subsequently thawed and used in the LEGENDplex Mouse Inflammation Panel (13-plex) (BioLegend, Cat. 740446) to determine effects on cytokine production (IL-23, IL-1α, IFN-γ, TNF, MCP-1, IL-12p70, IL-1β, IL-10, IL-6, IL-27, IL-17A, IFN-R, GM-CSF). Serum samples were diluted 2-fold and then incubated with capture beads conjugated to an antibody against specific analyte. After washing, a biotinylated detection antibody mixture is added to create a “capture bead-analyte-detection antibody” sandwich. Streptavidin-phycoerythrin (SA-PE) is added to bind to the biotinylated detection antibodies. After a final wash, the mixtures are analyzed by flow cytometry where the beads are differentiated by size and internal fluorescence intensities. Cytokine concentration is determined by PE fluorescence and comparison to a standard curve of known cytokine concentrations using BioLegend's LEGENDplex data analysis software. The unique size and fluorescence characteristics of the beads allows for the simultaneous measurement of 13 cytokines.

### TNBS Model of Murine Colitis

[0353] Groups of 5 or 10 male BALB/c mice were used. Mice were fasted overnight (Day 1) before 2,4,6-Trinitrobenzene sulfonic acid solution (TNBS) challenge on Day 2. Distal colitis was induced by intracolonic instillation of TNBS (1 mg in 0.1 mL 50% ethanol) after which, animals were kept in a vertical position for 30 seconds to ensure that the solution remained in the colon. For the treatments, mice were orally gavaged with 200 μl of I. colisanans MH27-2 at 1×10\hat{ }9 cells/day or vehicle (sterile glycerol and phosphate salt solution) starting from Day 1 (i.e., 1 days before TNBS) to Day 5 for a total of 5 consecutive days (Days 1-5). The positive control Cyclosporin A was given at 75 mg/kg by oral gavage once daily from Day 1 (i.e., 1 days before TNBS) to Day 4 for a total of 4 consecutive days (Days 1-4). On the Day of TNBS challenge, vehicle, I. colisanans MH27-2 and Cyclosporine A were given at 2 hours before TNBS. Animals were sacrificed on Day 5; blood was collected from all animals by cardiac puncture. The colon tissue was also harvested and snap frozen with liquid nitrogen for cytokine measurement. On Day 5, the mice were euthanized by CO₂ asphyxiation. Each colon was removed, rinsed, and then cut from 4 cm from the anus. The tissue sections were fixed in 10% formalin and kept in 70% ethanol for histopathology.

### Macroscopic Scoring of TNBS Colitis

[0354] On Day 5, the mice were euthanized by CO₂ asphyxiation, colons weighed and their lengths measured. Furthermore, when the abdominal cavity was opened before removal of the colon, adhesions between the colon and other organs were noted as was the presence of colonic ulceration after removal and weighing of each colon. Macroscopic scoring was performed (Table 8), and photos of the intact colons taken.

### Histopathological Scoring of TNBS Colitis

[0355] Each colon was removed, rinsed, macroscopically scored, photographed, weighed and its length measured, and then cut to two parts from 4 cm from the anus; one part fixed in 10% formalin and kept in 70% ethanol for histopathology, another part snap frozen with liquid nitrogen for cytokine measurement (IL-6). For histological analysis (Colitis scoring; essentially as described by Dieleman L A et al., 1998), four-micrometre tissue sections were cut and stained with hematoxylin and eosin (H&E) under light microscope (LEICA DM2700 M, USA). Histological criteria included: abnormalities of mucosal architecture, extent of inflammation, erosion or ulceration, epithelial regeneration, and the percentage involvement by the disease process. The scoring was based on the findings of observers by examining two sections from each colon per animal. Total score for colitis (Total Colitis Index) were added, resulting in a combined histologic score range from 0 to 40 (Table 9). Cytokines were measured using a Millipore ELISA kit and a protocol adapted from the product information and manual. Score between 0-20 for 2× sections and add scores for a total range 0-40.

### Cell Migration Analysis.

[0356] The TRANSWELL migration assay was used to assess the migration of HCT116 cells during exposure to I. colisanans culture supernatant extracts. These bacterial extracts were prepared using an Amberlite XAD-7 resin essentially as previously described by Colosimo et al. (Colosimo, 2019). Briefly, a single colony was inoculated and grown until early stationary phase. This “seed culture” broth was used to inoculate 600 mL of TY broth and the culture was incubated until early stationary phase. Culture supernatants were prepared by centrifuging the culture at 4000 g for 30 minutes and then passing the cell free supernatant through a 3 kDa filter according to the manufacturer's instructions (Sartorius Vivaflow® 50 Ultrafiltration Unit 3 kDa MWCO PES). Activated Amberlite XAD-7 resin was added to 400 mL of 3 kDa filtered cell-free supernatant (10% w/v), and the slurry was gently shaken overnight at 4° C. The resin was collected, washed with 400 mL of deionized water and then mixed with 120 mL of 100% methanol. Following a 2 hour incubation with gentle shaking, the methanol elution was collected. A second elution in 120 mL of 100% methanol was performed as previously described and the two elutions were ultimately combined and dried under vacuum using a rotary evaporator. The extract was fully resuspended at in 100% DMSO (thereafter referred to as 1000×) and stored at −20° C.

[0357] Human HCT116 gut epithelial cells were maintained in McCoys 5a medium supplemented with 10% FBS and 1% Pen/Strep. To assess cell migration via the Transwell® assay, 3.5×10⁴ HCT116 cells were seeded in 100 μL 10% FBS culture medium in the top compartment of a 6.5 mm insert with TC-treated polycarbonate membrane in 24-well plates (8 μm pore size, Corning Costar). 600 μl 10% FBS culture medium was added to the lower compartment. The cells were allowed to settle for 24 hours. After a DPBS wash, 100 μL and 600 μL of 0.5% FBS medium was added to the top and lower compartment, respectively. Then, 0.5× concentrated extract from I. colisanans was added to the lower compartment. After 16 hours, the cells were washed with DPBS and the cells attached to the top of the membrane were carefully removed with a cotton tip. The migrated cells on the bottom of the membrane were then fixed in 70% ethanol for 10 minutes followed by staining in 0.25% crystal violet for 5 minutes. The Transwell® inserts were washed with water, dried and the membrane mounted with 50% glycerol in water on glass slides and imaged immediately. Transwell® experiments were performed in biological and technical triplicates and for each replicate two representative images of the membrane were taken at 10× magnification. The number of migrated cells was automatically counted using ImageJ and the average cell number displayed. The extent of cell migration was expressed as the average number of migrated cells in two microscopic fields per well from 3 biological and 3 technical replicates.

[0358] The IncuCyte® Live-Cell Imaging System (Essen BioScience) and transwell migration assay were used to assess the migration of HCT116 cells during exposure to sterile culture supernatant from I. colisanans. Human HCT116 gut epithelial cells were maintained in McCoys 5a medium supplemented with 10% FBS and 1% Pen/Strep. For the IncuCyte® scratch wound assay, 3.5×10⁴ HCT116 cells were plated on poly-L-ornithine-coated IncuCyte® ImageLock 96-well plates (Essen BioScience). After 24 hours, the IncuCyte® WoundMaker tool was used to induce a homogeneous scratch wound in the nearly confluent cell monolayer. The cells were washed twice with DPBS and treated with I. colisanas supernatant extracts (prepared using an Amberlite XAD-7 resin as previously in section “Preparation of bacterial supernatant and medium extract” below) at 0.3× in 200 μL 0.5% FBS McCoys 5a medium was added. Similarly prepared bacterial medium extract served as negative control. Immediately after adding the stimulants, the plate was transferred to the IncuCyte® system and cell migration was monitored by imaging each well every 2 hours over the course of 72 hours. Data analysis was performed using the integrated analysis software.

TABLE 5
SCORING OF GUT BARRIER DYSFUNCTION
BY COLONOSCOPY

| | |
|---|---|
| Feature | Scoring |

Thickening of the colon wall

| | |
|---|---|
| Transparent | 0 |
| Moderate | 1 |
| Marked | 2 |
| Intransparent | 3 |

Changes in vascular pattern

| | |
|---|---|
| Normal | 0 |
| Moderate | 1 |
| Marked | 2 |
| Bleeding | 3 |

Granularity of the mucosal surface

| | |
|---|---|
| None | 0 |
| Moderate | 1 |
| Marked | 2 |
| Extreme | 3 |

Stool consistency/mucus secretion

| | |
|---|---|
| Normal and solid | 0 |
| Still shaped, mild mucus | 1 |
| Unshaped, mucus | 2 |
| Spread | 3 |

Extent of involved area

| | |
|---|---|
| 0-5% (none) | 0 |
| 5-20% (patchy) | 1 |
| 20-50% (moderate) | 2 |
| >50% (predominant) | 3 |

TABLE 6
SCORING OF HISTOLOGICAL COLITIS
Inflammation score (Scored 0-4)

| | |
|---|---|
| 0 | No evidence of inflammation |
| 1 | Low level of inflammation with scattered |
| | infiltrating mononuclear cells (1-2 foci only) |
| 2 | Moderate inflammation with multiple foci |
| 3 | High level of inflammation with increased vascular |
| | density and marked wall thickening |
| 4 | Maximal severity of inflammation with transmural |
| | leukocyte infiltration and loss of goblet cells |

Injury score (Scored 0-3)

| | |
|---|---|
| 0 | No epithelial injury |
| 1 | Occasional epithelial lesion |
| 2 | 1-2 foci of ulceration |
| 3 | Extensive ulceration |

Colitis activity (Composite score (/17)
based on measures listed below)

| | |
|---|---|
| Hypervascu- | 0-3 based on severity |
| larisation | |
| Presence of | 0-3 based on severity |
| mononuclear cells | |
| Epithelial | 0-3 based on severity |
| hyperplasia | |
| Epithelial | 0-3 based on severity |
| injury | |
| Presence of | 0-3 based on severity |
| neutrophils | |
| Lymphoid | Scored 0-2, where 0 = 0, 1 = ≤2, and 2 = ≥2 |
| aggregates | |

TABLE 7
HISTOLOGICAL SCORING SYSTEM
FOR ILEUM OF SKG MICE

| Feature | Grade | Description |
|---|---|---|
| Inflam- | 0 | Absent |
| matory | 1 | Scattered PMNs or MNs in lamina propria (LP) |
| infiltrate | | involving <5 intercryptal spaces contiguously |
| | | involved in an area |
| | 2 | Increased PMNs or MNs in LP and/or submucosa |
| | | involving >5 intercryptal spaces contiguously |
| | | involved in an area and ± crypt abscesses |
| | | and areas of crypt/villous loss <5 crypt widths |
| | 3 | Extensive transmural inflammatory infiltrate and |
| | | areas of crypt/villous loss >5 crypt widths and/or |
| | | confluent areas of crypt abscesses and/or mucosal |
| | | erosion/ulceration |
| Granulomata | 0 | Absent |
| | 1 | Aggregation of cells not definitely a granuloma |
| | 2 | A definite granuloma formation present |
| | 3 | Multiple granulomas present |
| Villous | 0 | Absent |
| Distortion | 1 | Villus height increased or decreased by <⅓ of |
| | | normal |
| | 2 | Villus height increased or decreased by ⅓-⅔ of |
| | | normal |
| | 3 | Villus height increased or decreased by >⅔ of |
| | | normal |

| Cross sectional | |
|---|---|
| area | Score |
| <1% | 0.5 |
| 1-25% | 1 |
| 26-50% | 2 |
| 51-75% | 3 |
| >75% | 4 |

For total histology score add scores from sections 1, 2 and 3 and multiply by cross sectional area involved.

TABLE 8
SCORING OF MACROSCOPIC COLITIS
The criteria for macroscopic scoring of colonic
damage are described as follows: Score

| | | |
|---|---|---|
| Adhesions | None | 0 |
| | Minimal (colon could be | 1 |
| | separated easily from other tissue) | |
| | Involving several bowel loops | 2 |
| Strictures | None | 0 |
| | Mild | 2 |
| | Severe, proximal dilatation | 3 |
| Ulcers/ | No damage | 0 |
| Inflammation | Focal hyperemia; no ulcers | 1 |
| | 1 site of ulceration/inflammation <1 cm | 2 |
| | 2 sites of ulceration/inflammation <1 cm | 3 |
| | Major site(s) of ulceration/inflammation >1 cm | 4 |
| | If damage >2 cm increase score by 1 for | 5+ |
| | each additional cm of damage | |
| Wall | <1 mm | 0 |
| thickness | 1-3 mm | 1 |
| | More than 3 mm | 2 |

TABLE 9
SCORING OF HISTOLOGICAL COLITIS

| | | |
|---|---|---|
| Abnormalities of | None (normal) | 0 |
| mucosal | Minimal for focal, not exceeding lamina propria | 1 |
| architecture | Mild abnormality, cystic dilation/aberrant crypts | 2 |
| | Moderate or multifocal abnormalities | 3 |
| | Severe, entire crypt and epithelium lost | 4 |
| Extent of | None | 0 |
| inflammation | Minimal for focal, scattered cells (<10%) | 1 |
| | Mild (10-25%) | 2 |
| | Moderate, inflammatory cells extending | 3 |
| | into the submucosa | |
| | Severe, transmural leukocyte infiltrate | 4 |
| | from mucosa to serosa | |
| Erosion or | No erosion, ulceration, or granulation tissue | 0 |
| ulceration | Minimal or focal, not exceeding lamina propria | 1 |
| | Unequivocal erosion | 2 |
| | Moderate, ulceration | 3 |
| | Severe, ulceration or granulation tissue | 4 |
| Epithelial | Complete regeneration or normal tissue | 0 |
| regeneration | Almost complete regeneration | 1 |
| | Regeneration with crypt depletion | 2 |
| | Surface epithelium not intact | 3 |
| | No tissue repair | 4 |
| Percent | None | 0 |
| involvement | 1-25% | 1 |
| | 26-50% | 2 |
| | 51-75% | 3 |
| | 76-100% | 4 |

### Characterisation of IL-6 and IL-6/IL-6R-Mediated STAT3 Suppressive Activity.

[0359] To assess IL-6 and IL-6/IL-6R-mediated STAT3 suppressive activity, three independent colonies were inoculated and grown until early stationary phase. Then, each seed culture broth was used to inoculate two technical replicates each generating six technical replicates from three biological replicates. The technical replicates were grown until early stationary phase and then cell free culture supernatant was harvested as previously described (Giri et al., 2019). Culture supernatants were size fractionated by passing through a 3 kDa CENTRICON® column according to the manufacturer's (Merck Millipore) instructions.

[0360] IL-6- and IL-6/IL-6R mediated STAT3 activity was assessed using the HEK Blue IL-6 cell line (Invivogen). Briefly, 50,000 cells per well were seeded in triplicate in a 96-well plate 24 hours prior to the start of the assay. Bacteria supernatant or sterile bacterial medium were added to the cells at a final concentration of 10% v/v for a 60-minute pretreatment. Then, recombinant human IL-6 (2 ng/mL) or IL-6/IL-6R complex (400 ng/mL)(R&D systems) was added and the cells were incubated at 37° C. for 24 hours. The ability of the supernatants to suppress IL-6 or IL-6/IL-6R mediated STAT3 activation was compared to the Janus kinase inhibitor tofacitinib (10 μM). After 24 hours, the STAT3 regulated SEAP reporter activity was assessed using Quanti Blue solution as recommended by the manufacturer (Invivogen). Results are the average of three (IL-6) or one (IL-6/IL-6R) independent experiments. Cytotoxicity was assessed using the CellTiter-Glo® 2.0 Cell Viability Assay (Promega, Australia) as recommended by the manufacturer.

### Characterisation of IL-23-Mediated STAT3 Suppressive Activity.

[0361] I. colisanans MH27-3 supernatant samples were prepared using a standard protocol. Briefly, three independent colonies of the bacterium of interest were inoculated and grown until early stationary phase. Then, each seed culture broth from three biological replicates was used to inoculate two technical replicates thus generating six technical replicates. The technical replicates were grown until early stationary phase and then raw cell-free culture supernatant was harvested. Culture supernatants were also size fractionated by passing through a 3 kDa CENTRICON® column according to the manufacturer's (Merck Millipore) instructions. R. bromii MCB950 supernatant samples were similarly prepared except that two biological replicates were used to generate four technical replicates.

[0362] IL-23-mediated STAT3 activity was assessed using the HEK Blue IL-23 cell line (Invivogen). Briefly, the HEK-Blue IL-23 reporter cell line is stably transfected with IL23R, STAT3 and a Secreted Embryonic Alkaline Phosphatase (SEAP) reporter gene. Stimulation with IL-6 results in STAT3 dependent expression of SEAP. SEAP is secreted into the medium and the extent of SEAP expression can be quantified using QUANTI-Blue solution. HEK-Blue IL-23 cells were cultured in DMEM supplemented with 10% FBS accordingly to the manufacturer's directions.

[0363] For the IL23-STAT3 assay, 50,000 cells of HEK-BIue™ IL-23 cell line were grown overnight in 96 wells plates. Supernatants were initially tested at the final concentration of 10%, 25% or 50% v/v with IL-23 at a final concentration of 5 ng/mL. For all the experiments and treatments demonstrated herein, supernatants were tested at the final concentration of 25% (v/v). IL-23 was tested at a final concentration of 5 ng/mL while tofacitinib was tested at a final concentration of 5 μM. IL-23 alone and IL-23 with tofacitinib were included in the assay as positive and negative controls for IL-23 signalling. Treated cells were incubated at 37° C. for 6 hours.

[0364] SEAP production was quantified using QUANTI-BIue™ solution and recorded as optical density (OD) at 630 nm using a PHERAstar FS plate reader (BMG Labtech). Inhibition of the STAT3 signalling by bacterial supernatants was compared to the STAT3 signalling activation of its relative medium control. Of note, in some cases, the medium control itself showed some level of STAT3 signalling inhibition, however the effect of the relative leads was in many cases more potent than the medium.

[0365] All experiments were performed at least in triplicate. All data were generated from at least three technical replicates and at least three biological replicates. T-test and ANOVA test were performed accordingly using GraphPad Prism 9 software.

### Preparation of Bacterial Supernatant and Medium Extract.

[0366] Bacterial culture supernatants were prepared by inoculating three independent colonies of I. colisanans MH27-2 and growing the culture until early stationary phase. The three “seed cultures” were used to each inoculate 160 mL of YG/V broth in duplicate and the cultures were again incubated until early stationary phase. The culture supernatants were collected and prepared by centrifuging the culture at 4000 g for 30 minutes and then passing the cell free supernatant through Amicon Ultra-15 3 kDa centrifugal filters.

[0367] Bacterial culture supernatant extracts were prepared using an Amberlite XAD-7 resin as previously described by Colosimo et al. (supra). Briefly, activated Amberlite XAD-7 resin was added to 150 mL of 3 kDa-filtered cell-free supernatant (10% w/v), and gently shaken overnight at 4° C. The resin was collected, washed with 150 mL of deionized water, and mixed with 50 mL 100% methanol. Following 2 h incubation with gentle shaking, the methanol elution was collected. A second elution in 25 mL of 100% methanol was performed as previously described and the two elution were combined and dried with a rotary evaporator under vacuum. Dried extracts were resuspended in 100% DMSO at a 100× concentration and stored at −80° C.

[0368] Bacterial culture supernatant solid phase extraction fractions were prepared using Strata-X 33 μM Polymeric Reversed Phase columns. Briefly, after conditioning and equilibration, columns were loaded with 3 kDa-filtered cell-free supernatant, washed 4 times with an equal volume of de-ionised water and then eluted with 15, 30, 60 and 100% of acetonitrile. Each elution was dried with a rotary evaporator under vacuum and resuspended in 100% DMSO at a 100× concentration and stored at −80° C.

### LC-MS/MS-Based Metabolomic Analysis.

[0369] Targeted metabolomic analysis was carried out by MS-Omics (Denmark). Briefly, to assess the metabolites produced by I. colisanans MH27, six independent colonies were inoculated and grown until early stationary phase. Then, each seed culture broth was used to inoculate two technical replicates of YG/V generating 12 technical replicates from six biological replicates. The technical replicates were grown until early stationary phase and then cell free culture supernatant was harvested following centrifugation at 12,550 g for 3 minutes in an anaerobic chamber. Culture supernatants were snap frozen on dry ice and then stored at −80° C. until testing.

[0370] The analysis was carried out using a Thermo Scientific Vanquish LC coupled to Thermo Q Exactive HF MS. An electrospray ionization interface was used as ionization source. Analysis was performed in negative and positive ionization mode. The UPLC was performed using a slightly modified version of the protocol described by Catalin et al. (UPLC/MS Monitoring of Water-Soluble Vitamin Bs in Cell Culture Media in Minutes, Water Application note 2011, 720004042en). Peak areas were extracted using Compound Discoverer 3.1 (Thermo Scientific). Identification of compounds were performed at four levels; Level 1: identification by retention times (compared against in-house authentic standards), accurate mass (with an accepted deviation of 3 ppm), and MS/MS spectra, Level 2a: identification by retention times (compared against in-house authentic standards), accurate mass (with an accepted deviation of 3 ppm). Level 2b: identification by accurate mass (with an accepted deviation of 3 ppm), and MS/MS spectra, Level 3: identification by accurate mass alone (with an accepted deviation of 3 ppm).

[0371] The untargeted metabolomic analysis was carried out using a Thermo scientific UltiMate 3000 UHPLC coupled to Thermo Q Exactive Plus MS. A gradient from 3 to 95% acetonitrile with 0.1% formic acid was performed at a flow rate of 0.25 μL/min for a total of 85 minutes. An electrospray ionization interface was used as ionization source. MS data were acquired from an MS1 survey over m/z 100-1,500 at 35,000 resolution in data dependent acquisition mode, with up to ten MS2 scans in CID/HCD mode acquired per cycle with 35,000 resolution and one microscan in positive or negative mode. The maximum injection time was set to 100 ms, and the MS2 precursor window was set to 1.2 m/z. The normalized collision energy was set to stepped energy mode where normalized collision energies (NCEs) from 20, 30 and 40% were combined, with the default charge state set as z=1. MS2 experiments were set to be automatically triggered within 5 to 10 s of their first occurrence at the apex of a peak. The dynamic exclusion time was set to 10 s. Ion species with unassigned charge states and isotope peaks were excluded. Further metabolic profile analysis and key metabolite identification were performed using the GNPS platform as described by Aron et al (9).

### Assessment of Barrier Function.

[0372] The ability of I. colisanans MH27 to prevent loss of barrier integrity was assessed by measuring the transepithelial electrical resistance (TEER) across confluent monolayers of T84 gut epithelial cells. T84 cells were purchased from CellBank Australia and cultured in Dulbecco's Modified Eagle Medium Nutrient Mixture 12 (DMEM/F12; ThermoFisher Scientific, Waltham, MA, USA) supplemented with 5% foetal bovine serum and 1% Penicillin-Streptomycin. T84 cells were seeded into 24-well Millicell polycarbonate cell culture inserts with 0.4 μm pore size (PSHT010R5) at a density of 60.000 cells per well in 400 μL medium, and 24 ml of medium was added into the single-well feeder tray. Medium changes of both compartments were performed every second day. After 7 days of culture, the upper part of the plate assembly with cell culture inserts were transferred from the feeder tray to a 24-well receiver tray (PSMW010R5), with each well containing 800 μL media. TEER values of each well were measured daily using the Millicell ERS-2 Voltohmmeter. Experiments were started once the cells in all wells reached stable TEER readings above 1500 n.

[0373] In the first experiment, 3 kDa-filtered bacterial medium (YG/V) or 3 kDa-filtered I. colisanans MH27 bacterial culture supernatant diluted to 10% v/v in T84 medium was added to the apical compartment and pre-treated for one hour. Then, IFNγ (50 ng/ml) was added to the basal compartment to disrupt barrier integrity. After 48 hours of IFNγ treatment, the medium containing IFNγ in the basolateral compartment was removed, the wells washed twice with warm PBS, and fresh T84 medium was added. From then on, the medium in the lower compartment was replaced every 24 hours. Likewise, the YG/V and I. colisanans MH27-2 based treatments in the apical compartment were refreshed every 24 hours, and the TEER values were measured immediately prior to and directly after the treatments. Data from two biological replicates with duplicate measurements each were presented as the percentage difference in TEER value compared to the control (untreated T84 cells). Statistical significance was determined by unpaired t test.

[0374] In a second experiment, bacterial medium extract (YG/V) or I. colisanans MH27-2 bacterial extract at 2×, 1× and 0.5× concentration was added to the apical compartment. IL-6 (10 ng/mL) was then added to disrupt barrier integrity and removed after 96 hours treatment. Every 24 hours, the treatments and medium were refreshed, and the TEER values were measured in duplicate. Data from two biological replicates with duplicate measurements each were presented as the percentage difference in TEER value compared to the control (untreated T84 cells). Statistical significance was determined by unpaired t test.

### Assessment of Tight Junction-Associated Protein Expression.

[0375] The ability of I. colisanans MH27-1, MH27-2, and MH27-3 to prevent IFNγ-mediated loss of Zonula Occludens 1 (ZO1) expression was assessed through immunofluorescence staining and confocal microscopy. T84 cells were cultured as described above and seeded onto microscopy slides in 24-well plates at a density of 150.000 cells per well in 800 μL of medium. Cells were grown for three weeks, and media changed every second day. For I. colisanans, cells were pre-treated with 3 kDa-filtered extract control (YG/V), or 3 kDa-filtered complete- or fractionated I. colisanans MH27 bacterial extracts diluted to 1× in medium and incubated at 37° C. with 5% CO₂ overnight after which 100 ng/mL IFNγ was added to select wells. For metabolites produced by I. colisanans, T84 cells were pre-treated with 1 mM ornithine, indole-3-acrylic acid or indole-3-proprionic acid for 18 hours prior to stimulation with IFNγ for 48 hours. Cells were incubated for a further 48 h then fixed with 4% paraformaldehyde for 15 minutes and washed three times with PBS and stained protected from light. To this end, coverslips were first incubated for 10 minutes with 0.1% Triton X-100 in 5% BSA/PBS. Cells were washed three times with PBS and incubated for 2 hours in 5% BSA/PBS. Next, they were washed three times with PBS and incubated with primary rabbit anti-human ZO1 antibody (5 μg/mL, Invitrogen) in 5% BSA/PBS for 2 hours, and then again washed three times with PBS. Cells were incubated with Alexa Fluor® 488-conjugated goat anti-rabbit IgG H&L secondary antibody (1:2000, ThermoFisher Scientific) and DAPI (1:1000, ThermoFisher Scientific) in 5% BSA/PBS for 1 h. Coverslips were washed three times with PBS, once with ultrapure water, and then mounted using ProLong Gold Antifade Mountant (Invitrogen). Image acquisition was performed using an inverted and fully motorised Nikon/Spectral Spinning Disc Confocal microscope (X-1 Yokogawa spinning disc with Borealis modification) with a 60×NA 1.49 Plan Apochromat oil immersion objective lens (Nikon). Images were acquired across the cell using a coupled device (CCD) camera (Andow Clara) and the Nikon elements imaging software (Nikon, Version 4.40). For each condition, four separate images were captured. Maximum projection images were assembled, and relative brightness of stained cells quantified and calculated for each image using Fiji ImageJ (Version 1.53t) and normalised to unstimulated control cells. Experimental raw data can be found in Appendices 3-5. Statistical significance was determined by one-way ANOVA and Dunnett's correction for multiple comparison.

### PBMC Isolation and Stimulation

[0376] PBMCs were isolated from peripheral blood of healthy donors. The cells were adjusted to a density of 2×10⁶ cells/mL in RPMI 1640 (supplemented with gentamicin (150 g/mL), 2 mM L-glutamine and 10% heat inactivated FBS) and seeded in 24-well tissue culture plates. Following overnight incubation at 37° C. in a 5% CO₂ incubator, 50 μL of live I. colisanans strain MH27-2 was added to give a multiplicity of infection of 1:1. Supernatants were collected and clarified by centrifugation following 24 h of stimulation at 37° C. in a 5% CO₂ incubator. Supernatants were stored at −80° C. until required. IL-10 and IL-12 were quantified using an Ella Automated Immunoassay System according to the manufacturer's instructions (Protein Simple).

### Assessment of NF-κB Modulating Activity

[0377] NF-κB activity was assessed using a custom LS174T goblet cell like cell line stably transfected with an NF-κB reporter lentivirus with Firefly luciferase under the control of a minimal (m)CMV promoter and tandem repeats of the NF-kB transcriptional response element. Stimulation with TNF results in NF-κB-p65 dependent expression of luciferase which can be quantified using Pierce Firefly Luc One-Step Glow assay kit (Thermo Scientific). LS174T-NF-κB cells were cultured in DMEM supplemented with 10% FBS. For the NF-κB assay, 50,000 cells of LS174T-NF-κB cell line were grown overnight in 96 wells plates. Cells were pre-treated with bacterial supernatants at a starting concentration of 25% v/v at 37° C. for 30 minutes. Then, TNF was added to a final concentration of 50 ng/ml. TNF alone and TNF plus the NF-κB inhibitor indole-3-carbinol (I3C) at a final concentration of 5 mM were included in the assay as positive and negative control for NF-κB signalling. Treated cells were incubated 37° C. for 7 hours. Luciferase activity was quantified using a Pierce Firefly Luc One-Step Glow assay kit and recorded using a PHERAstar FS plate reader (BMG Labtech). Modulation of NF-κB signalling by bacterial supernatants was compared to the NF-κB signalling activation of its relative medium control.

[0378] The disclosure of every patent, patent application, and publication cited herein is hereby incorporated herein by reference in its entirety.

[0379] The citation of any reference herein should not be construed as an admission that such reference is available as “Prior Art” to the instant application.

[0380] Throughout the specification the aim has been to describe the preferred embodiments of the invention without limiting the invention to any one embodiment or specific collection of features. Those of skill in the art will therefore appreciate that, in light of the instant disclosure, various modifications and changes can be made in the particular embodiments exemplified without departing from the scope of the present invention. All such modifications and changes are intended to be included within the scope of the appended claims.

### REFERENCES

[0381] Arumugam, M. et al., Enterotypes of the human gut microbiome. Nature 473 (7346): 174-180 (2011).
[0382] Azad et al., Probiotic supplementation during pregnancy or infancy for the prevention of asthma and wheeze: systematic review and meta-analysis. BMJ. (2013) 347:f6471.
[0383] Benham H, Rehaume L M, Hasnain S Z, Velasco J, Baillet A C, Ruutu M, et al. Interleukin-23 Mediates the Intestinal Response to Microbial 0-1,3-Glucan and the Development of Spondyloarthritis Pathology in SKG Mice. Arthritis & Rheumatology. 2014; 66(7):1755-67.
[0384] Brestoff J. R. and Atris D., Commensal bacteria at the interface of host metabolism and the immune system. Nat. Immunol., 14: 676-684 (2013).
[0385] Britto S L, Krishna M, Kellermayer R. Weight loss is a sufficient and economical single outcome measure of murine dextran sulfate sodium colitis. FASEB bioAdvances. 2019; 1(8): 493-7.
[0386] Chan, W., Chen, A., Tiao, D., Selinger, C. & Leong, R. Medication adherence in inflammatory bowel disease. Intest. Res. 15, 434 (2017).
[0387] Chaumeil, P. A., Mussig, A. J., Hugenholtz, P., and Parks, D. H., GTDB-Tk: A Toolkit to Classify Genomes with the Genome Taxonomy Database. (2020) Bioinformatics 36 (6): 1925-27.
[0388] Cheluvappa et al., (2014) Clin. Exp. Immunol. 175(2): 316-22.
[0389] Colosimo D A, Kohn J A, Luo P M, Piscotta F J, Han S M, Pickard A J, et al. Mapping interactions of microbial metabolites with human G-protein-coupled receptors. Cell Host & Microbe. 2019; 26(2): 273-82.e7.
[0390] D'Haens, G, Sandborn, WJ, Feagan, B G, et al. A review of activity indices and efficacy end points for clinical trials of medical therapy in adults with ulcerative colitis. Gastroenterology. 2007; 132: 763-86.
[0391] Fabro et al., (2015) Immunobiology, 220(1): 124-35.
[0392] Friedrich M, Pohin M, Powrie F. Cytokine Networks in the Pathophysiology of Inflammatory Bowel Disease. Immunity. 2019; 50(4):992-1006.
[0393] Foligne B, Nutten S, Grangette C, Dennin V, Goudercourt D, Poiret S, et al. Correlation between in vitro and in vivo immunomodulatory properties of lactic acid bacteria. World Jour Gastroenterol. 2007; 13(2): 236-43.
[0394] GBD 2017 Inflammatory Bowel Disease Collaborators, The global, regional, and national burden of inflammatory bowel disease in 195 countries and territories, 1990-2017: a systematic analysis for the Global Burden of Disease Study 2017; Lancet, 5(1): 17-30.
[0395] Geva-Zatorsky, N. et al. Mining the human gut microbiota for immunomodulatory organisms. Cell 168, 928-943 (2017).
[0396] Giri R, Hoedt E C, Shamsunnahar K, McGuckin M A, Morrison M, Capon R J, et al. Secreted microbial metabolites modulate gut immunity and inflammatory tone. bioRxiv. 2019:2019.12.16.861872.
[0397] Goldin B. R., Gorbach S. L. Clinical indications for probiotics: an overview. Clin Infect Dis. (2008) 46 Suppl 2: S96-100.
[0398] Handbook of Pharmaceutical Excipients, 2nd Edition, (1994), Edited by A Wade and PJ Weller.
[0399] Hu X, li J, Fu M, Zhao X, Wang W. The JAK/STAT signaling pathway: from bench to clinic. Signal Transduction and Targeted Therapy. 2021; 6(1):402.
[0400] Kabat, A. M., Srinivasan, N. & Maloy, K. J. Modulation of immune development and function by intestinal microbiota. Trends Immunol. 35, 507-517 (2014).
[0401] Kailasapathy et al. (2002) Curr. Issues Intest. Microbiol. 3(2):39-48.
[0402] Karagozian, R. & Burakoff, R. The role of mesalamine in the treatment of ulcerative colitis. Ther. Clin. Risk Manag. 3, 893 (2007).
[0403] Kim et al., Intestinicoccus butyricigenes sp. nov., a butyrate-producing bacterium isolated from human faeces, J. Microbio. 57(1): 38-44; (2019).
[0404] Liu G, Mateer S W, Hsu A, Goggins B J, Tay H, Mathe A, et al. Platelet activating factor receptor regulates colitis-induced pulmonary inflammation through the NLRP3 inflammasome. Mucosal Immunol. 2019; 12(4): 862-73.
[0405] Mallone R., Mannering S. I., Brooks-Worrell B. M., Durinovic-Belló I., Cilio C. M., Wong F. S., et al. Isolation and preservation of peripheral blood mononuclear cells for analysis of islet antigen-reactive T cell responses: position statement of the T-Cell Workshop Committee of the Immunology of Diabetes Society. Clin Exp Immunol. 2011; 163(1): 33-49.
[0406] Marks E, Goggins B J, Cardona J, Cole S, Minahan K, Mateer S, et al. Oral delivery of prolyl hydroxylase inhibitor: AKB-4924 promotes localized mucosal healing in a mouse model of colitis. Inflamm Bowel Dis. 2015; 21(2): 267-75.
[0407] Masco, L. et al., Identification of Bifidobacteriurn species using rep-PCR fingerprinting, Systematic and Applied Microbioloogy, 26(4): 557-563 (2003).
[0408] McLornan D P, Pope J E, Gotlib J, Harrison C N. Current and future status of JAK inhibitors. Lancet. 2021; 398 (10302):803-16.
[0409] McSweeney C. S., Denman S. E., Mackie R. I., Rumen bacteria. In: Makkar H P S; Methods in gut microbial ecology for ruminants. 23-37 (2005).
[0410] Meddings, J. B., Jarand, J., Urbanski, S. J., Hardin, J., Gall, D. G. Increased gastrointestinal permeability is an early lesion in the spontaneously diabetic BB rat. Am. J. Physiol. 276, G951-G957 (1999).
[0411] Mitropoulou et al. (2013) J. Nutr. Metab. (2013) 716861.
[0412] Remington's Pharmaceutical Sciences, Mack Publishing Co. (A. R. Gennaro edit. 1985).
[0413] Monteleone et al., (2011) BMC Medicine. 2011, 9:122.
[0414] Parks, D. H., Chuvochina, M., Waite, D. W., Rinke, C., Skarshewski, A., Chaumeil, P. A., and Hugenholtz, P. A Standardized Bacterial Taxonomy Based on Genome Phylogeny Substantially Revises the Tree of Life. (2018) Nature Biotechnology.
[0415] Salas A, Hernandez-Rocha C, Duijvestein M, Faubion W, McGovern D, Vermeire S, et al. JAK-STAT pathway targeting for the treatment of inflammatory bowel disease. Nature Reviews Gastroenterology & Hepatology. 2020; 17(6): 323-37.
[0416] Sapone, A. et al., Zonulin upregulation is associated with increased gut permeability in subjects with type 1 diabetes and their relatives. Diabetes 55, 1443-1449 (2006).
[0417] Schieck et al., (2014) J. Allergy Clin. Immunol. 133(3): 888-91.
[0418] Schindler et al., JAK-STAT signaling: from interfeons to cytokines, J. Biol. Chem. (2007) 282(28): 20059-63.
[0419] Schroeder, KW, Tremaine, WJ, Ilstrup, DM. Coated oral 5-aminosalicylic acid therapy for mildly to moderately active ulcerative colitis. A randomized study. N. Engl. J. Med. 1987; 317:1625-9.
[0420] Sokol H, Pigneur B, Watterlot L, Lakhdari O, Bermudez-Humaran L G, Gratadoux J J, et al. Faecalibacterium prausnitzii is an anti-inflammatory commensal bacterium identified by gut microbiota analysis of Crohn disease patients. Proc. Natl. Acad. Sci. USA. 2008; 105(43):16731-6.
[0421] Sråtková, D. et al., Efficiency of PCR-based methods in discriminating Bifidobacterium longum ssp. Longurn and Bifidobacterium longum ssp. infantis strains of human origin. J. Microbiol, Methods, (2011) 87(1): 10-6.
[0422] United States Patent Publication No. 2016/0067188.
[0423] Yamamoto A, Itoh T, Nasu R, Nishida R. Effect of sodium alginate on dextran sulfate sodium- and 2,4,6-trinitrobenzene sulfonic acid-induced experimental colitis in mice. Pharmacology. 2013; 92(1-2): 108-16.
[0424] Yang F, Wang D, Li Y, Sang L, Zhu J, Wang J, et al. Th1/Th2 Balance and Th17/Treg-Mediated Immunity in relation to Murine Resistance to Dextran Sulfate-Induced Colitis. Journal of immunology research. 2017; 2017:7047201.
[0425] Ye et al., (2015) PLoS One, 10(1): e0117704.
[0426] Yin et al., (2014) Immunogenetics, 66(3): 215-8.

1. A composition comprising a cell or biologically pure culture of the Intestinicoccus colisanans strain deposited under accession number V21/015887 or V21/015888, or a derivative thereof.

2. (canceled)

3. (canceled)

4. (canceled)

5. A composition comprising a bacterial strain with a 16S rRNA sequence that is at least about 99%, 99.1%, 99.2%, 99.3%, 99.4%, 99.5%, 99.6%, 99.7%, 99.8%, or 99.9%, identical to any one of SEQ ID NOs: 1, 2 or 7-10, or which has a 16S rRNA gene sequence represented by any one of SEQ ID NOs: 1, 2 or 7-10.

6. The composition of claim 1, further comprising a pharmaceutically acceptable excipient, diluent, or carrier.

7. (canceled)

8. A pharmaceutical composition comprising a bacterial strain that is a phylogenetic descendant of the MRCA of I. colisanans and I. sp002305575, together with a pharmaceutically acceptable carrier, diluent, or excipient.

9. The pharmaceutical composition of claim 8, wherein the MRCA is defined at node 23596 of the bac120 phylogenetic tree from the Genome Taxonomy Database (GTDB) release 89.

10. The composition of claim 1, wherein the bacterial strain is at least partially isolated.

11. The composition of claim 1, wherein the bacterial strain is viable or non-viable.

12. The composition of claim 1, wherein the composition is in a dried form.

13. The composition of claim 1, wherein the composition is formulated in a capsule, a tablet, a pill, a troche, a lozenge, a powder, or a granule.

14. The composition of claim 1, wherein the composition is dried by lyophilisation, spray drying, fluidized bed drying, vacuum drying, or a combination thereof.

15. (canceled)

16. The composition of claim 1, further comprising a prebiotic.

17. The composition of claim 1, further comprising one or more additional bacterial strains.

18. (canceled)

19. (canceled)

20. The composition according to claim 1, wherein the bacterial strain produces an agent that attenuates or impairs signal transducer and activator of transcription 3 (STAT3) signalling in a cell.

21. The composition according to claim 20, wherein the agent is a small molecule, peptide, or nucleotide.

22. The composition according to claim 20, wherein the agent is released by the bacteria.

23. The composition according to claim 20, wherein the agent binds specifically to any one of STAT3, JAK2, TYK, or IL-23.

24. The composition according to claim 1, wherein the bacterial strain produces one or more metabolites selected from cyclo(-Phe-Pro), indole-3-lactic acid, allopurinol, propionylcarnitine, pyrogallol, 3-(2-hydroxyethyl)indole, N-acetyl-cysteine, tryptophol, indole-3 propionic acid, ornithine, acetate and/or a combination thereof.

25. The composition according to claim 1, wherein the bacterial strain is of the species I. colisanans.

26.-131. (canceled)

The application's sequence listing, which the Patent Office published only in electronic form, follows.

SEQUENCE LISTING (22 sequences)

SEQ ID NO: 1 - DNA, 1527 bp, Intestinicoccus colisanans
  source 1..1527: mol_type = genomic DNA
tatagagagtttgatcctggctcaggacgaacgctggcggcgtgcttaacacatgcaagtcgaacgagaatctgtggaaagaggattcgtccaattgaagcagaggacagtggcggacgggtgagtaacgcgtgaggaacctgcctttcagagggggacaacagttggaaacgactgctaataccgcatgacacataggtgtcgcatggcacttatgtcaaagatttatcgctgaaagatggcctcgcgtctgattagctagttggtgaggtaacggcccaccaaggcgacgatcagtagccggactgagaggttgaacggccacattgggactgagatacggcccagactcctacgggaggcagcagtggggaatattgggcaatgggcgcaagcctgacccagcaacgccgcgtgaaggaagaaggctttcgggttgtaaacttcttttgtcagggacgagtagaagacggtacctgacgaataagccacggctaactacgtgccagcagccgcggtaatacgtaggtggcaagcgttgtccggatttactgggtgtaaagggcgtgtagccgggagggcaagtcagatgtgaaatccacgggctcaactcgtgaactgcatttgaaactactcttcttgagtatcggagaggcaatcggaattcctagtgtagcggtgaaatgcgtagatattaggaggaacaccagtggcgaaggcggattgctggacgacaactgacggtgaggcgcgaaagcgtggggagcaaacaggattagataccctggtagtccacgctgtaaacgatgaatactaggtgtgcggggactgaccccctgcgtgccgcagctaacgcaataagtattccacctggggagtacgatcgcaaggttgaaactcaaaggaattgacgggggcccgcacaagcggtggattatgtggtttaattcgaagcaacgcgaagaaccttaccagggcttgacatcctactaacgaagtagagatacatcaggtgcccttcggggaaagtagagacaggtggtgcatggttgtcgtcagctcgtgtcgtgagatgttgggttaagtcccgcaacgagcgcaacccctattgttagttgctacgcaagagcactctagcgagactgccgttgacaaaacggaggaaggtggggacgacgtcaaatcatcatgccccttatgtcctgggctacacacgtaatacaatggcggtcaacagagggatgcaaaaccgtgaggtggagcgaacccctaaaagccgtcccagttcagatcgtgggctgcaacccgcccacgtgaagtcggaatcgctagtaatcgcggatcagcatgccgcggtgaatacgttcccgggccttgtacacaccgcccgtcacaccatgagagtcgggaacacccgaagcccgtagcctaacctaacggagggcgcggtcgaaggtgggttcgataattggggtgaagtcgtaacaaggtagccgttcgagaacgagcggctggatcacctccttt

SEQ ID NO: 2 - DNA, 1515 bp, Intestinicoccus colisanans
  source 1..1515: mol_type = genomic DNA
tttagagagtttgatcctggctcaggacgaacgctggcggcgtgcctaacacatgcaagtcgaacggagttgaaaggagcttgcttttttcaactcagtggcggacgggtgagtaacgcgtgagtaacctgcctttcagagggggataacgttctgaaaagaacgctaataccgcataagattgtagtttcgcatggagcagcaatcaaaggagcaatccgctgaaagatggactcgcgtccgattagatagttggcggggtaacggcccaccaagtcgacgatcggtagccggactgagaggttgatcggccacattgggactgagacacggcccagactcctacgggaggcagcagtgagggatattgggcaatgggggaaaccctgacccagcaacgccgcgtgagggatgacggttttcggattgtaaacctctgtcctctgtgaagatagtgacggtagcagaggaggaagctccggctaactacgtgccagcagccgcggtaatacgtagggagcaagcgttgtccggatttactgggtgtaaagggtgcgtaggcggattggcaagtcagaagtgaaatccatgggcttaacccatgaactgcttttgaaactgttagtcttgagtgaagtagaggtaggcggaattcccggtgtagcggtgaaatgcgtagagatcgggaggaacaccagtggcgaaggcggcctactgggctttaactgacgctgaggcacgaaagtgtgggtagcaaacaggattagataccctggtagtccacactgtaaacgatgattactaggtgtggggggtctaaccccctccgtgccggagttaacacaataagtaatccacctggggagtacgaccgcaaggttgaaactcaaaggaattgacgggggcccgcacaagcagtggagtatgtggtttaattcgacgcaacgcgaagaaccttaccaggtcttgacatccaactaacgaagcagagatgcgttaggtgcccttcggggaaagttgagacaggtggtgcatggttgtcgtcagctcgtgtcgtgagatgttgggttaagtcccgcaacgagcgcaacccttgtgattagttgctacgcaagagcactctaatcagactgccgttgacaaaacggaggaaggtggggacgacgtcaaatcatcatgccctttatgacctgggctacacacgtactacaatggtcgttaacagagggaagcaataccgcgaggtggagcaaaaccctaaaaacggtctcagttcagattgtaggctgcaactcgcctacatgaagttggaattgctagtaatcgcggatcagcatgccgcggtgaatacgttcccgggccttgtacacaccgcccgtcacaccatgggagccggtaatacccgaagtcagtagtttaaccgtaaggagaacgctgccgaaggtaggattggcgactggggtgaagtcgtaacaaggtagccgtatcggaaggtgcggctggatcacctccttt

SEQ ID NO: 3 - DNA, 1568546 bp, Intestinicoccus colisanans
  source 1..1568546: mol_type = genomic DNA
tcgtcggtgctctctcaagtgggcgggacgctgaaacgggtcaaaaaaagcctggggcggattttcaaaaagtcctcgaagcgttcctccaagttgaagaaccataccttcatgttgttagacctgagaccgggcgctgggaatatgctgggggcatattgggagtacgatcctccatggcttggatcgtttgggatgctcaattatgttcagccgaacataattgagctaatgtaaagctaagaaaaatgttgagtcacctccctgaagtgtagtaaagccagcaagaatgctcctgctggctttacattattctgtgaaattatttagttggaatatagagctgagtcaaccattgcatcaaattttcgtcatccgtccaagagagctgctggtcactaagctgctgcggatgcacttgctccaacagcttttgcttcattttaatgttcagccgggcatacacctcggtagttttaatgtcagaatgccctaacaggtcttttatatattgtaaatctacaccagcctctaaccaatgcatcgctcggctgtgtctgaaaacatgaggatggacccgcactgggaacaaatcaggcttctccttctgtgcaagggaaacatatttctgtatgatgtagtagacaccgccccgtgtcagagaagccttgcttctgttgcaaaaaagcggggcatctatatcacattggcgatatcgggattcctcagtcagataatccttcaatatctttgcaggtacaggaagaactggtatatctcggaactttcttcccttaccttttagatgtacaacggcccattttttatcaaaacggatatcaccaaagcgaaggttagcgatttcagatgcacgagcagcagattcatagattaaggtcaagaaggcaaagtcacgccgtccctcacgcgttgtaaggttcggctgtcccaaaatagtttggatggcttcttccgaaagatgcgggacaaccctttgctcacatttcttcggaggaatttcccggatctgttggcatagcagtacaaagcctggatcttcatactgcaggaacttaaaaaacgcattgattgctgctcgccgttggttccttgtcgtaatagagttacctttctcctgttccagccaccggaaaaaagcatcaattagctccctattgaaatcgctaacttccagcttatctcttcgaattttgcgttcccgttcacagaaatccagcagcaaggacattgcgtctcgataggattgaattgtttcttggcttagtcccctttcagatggtaaatactcaaagaaatatcttgataacgttttggcaaaaaaagtcggtccacgattagccatcctgcaatccctcgctttccgtggcaaagtcaaacggagcatacatgccgcccaaattctgttcacaaatatccatgatatgggggaaggattgtgcggtcaggcggagatagtactgggtggaactaatcgatgtatgcccaatataacgggaaagaatcagtagattgctgtatattgggagtccagcttcagcccatttttggatattatggcaacaaaatgtatgacggagatcatgcacgcgcggcccaaattgcttccccttatatggaatccccacatcccataaaatgccgcgaaagaactttccaatggtggattttgtataaggggtcccgccctttgcataaaagaacggcgttgattcgacagtgtttttatgaacagcctgcgaatattttctacattcttccgtcaatgtggcagacattgggacaatcctctcgcggtcattctttccgtgccgtatgtgcaaaattccgtctttcaaatccacatcgttttttagtaatgccagcgcttcagaaattcgaaggccacagccatagagtacgcgaaataagagtggcatagtaagatgtcggttaggggataggttactcggagaaagtgagtcaagtcgttcaaaaatgagatgtaactcatccgttgaaaaaatatagggtacgtgttgttctccgcatttgggaagggccggaagtaggtaggatggataaccttgtttgcacagatattgggcaaacctctgcatctcactcactcggctatatcgggtggcgtctgcctcatttgggcgcttcttgcaccatgtcaaggcaatctctttcgtaattgtgtaactctgaatctcataatctttacaaaaattatcgaatagccgcagcagtttggcctgctggttgtagtccagaccagatgcccttttttgtgccacataggattcgcatattggagcaaatggtcctgtaaagaagggcttcttactcatagaagcacctccaatgcacatcgtctcagcatttctgtattgaggctaacgtatacctgtgtgctttccggtgtggcatgacccagcgtttgcgcaatgtccgttaattctgctccatttttcagcatggaggtagcgacactgtgtcggaagctgtgcatcccaatcggtttatccgtagagacatgaatacctgctttagaaacgagtttggaaaccaacctttgcatagaaccgttcatgacatcaaacggtgcgaggtgccggacaaatatacatgggcagtctgtctctgggcggccatgctggaggtaatcaatgattgcccagccaacatcttcgagtaacggaagttctaagggtatccctgttttttgctgataaattaaaatccgcttatttttccagtcaatattctcgaatcgaagtagccgcacgtcactgatgcgcagccccagccgagtgaccaacaatagaattgcatagttccgctttcccaatgggttagatcggtctacctgagccagaatgcactctacctcatcaggtgagaaaaccgtaggcaggcgatacttatgtgtccgtctgacacagggcaaggcattggcgtggctgatatgatggtagcctttggtcaatgcgtaatcaaacagcttgcctaagatgcgaattgttgccgcaaccgtaccgggagaaaatccagtcaaagattcaatataagtatttacatggtgcagctcaagctggtggaaatgctcaatgccggactccagtagaaaatactcaaagcgaaatagcctgctccgccaagtcctgatagaaccttcagccacttggttttggcgcaagctgtccaaaaagccttcaaatagctccttataggctggagaaaagcccttcaaggtgatacttgattgcttaaagaccatcccatactgtaaataatcgtccaacatatgaatagcccggctgacattctgagatatatccctatcgccaagatcggcaccatatcgttcccagacaaatctccgctctaaatccacggtgaactcagttgcctgatgcgcttcgcagtatacaatcaactccttccatgtcgcgtctaaccttaaaatcgtgctttcactgtagccaagttccgccagatgcaattttaactcatcaactgtcttgacgagccatttctttggcgggcctgtgtactccattgtcataagctaatacctccgattcatttgtatggcaattgccaccacttaaattatagggggttatatttagcagaacaatataatgtgttttgtctattcttgttgaaaacaggcttagcgtgacgtataatatttccacaataaagcaaatgaaacgaggtgttatcatggcccaaattgattattatagaaccactttgctcaaaaaaagggaggagttggcaaaactaaatcaagatttagctcgtgagcaggctaaaattgctcctttacagaaaaaaattatatctgctaaaagcgcaatcaatcgaacaaaaagcgattccacaataaaatccaggctttcagagattgaccgtgcggaaaagtctattgccgacatacaaaagaaatgcggcgatattcaagcaaaaatagcacaaaaagagaaggaatatgctactgccgacaaaaactatcgaaatgaagaagctaagctcaataaaaaagcagctgatgatgaaaagaaacgtcttcagcagtctgctcggcaatcagccgcgatggagcaggctatacggcgtcaagagcaacatcaggctcaaatgcagagggaaattgatagtataaaggcaattcctgaaaaaataactgtgcttttcttagcggcaaaccccgttggcacacaccagttgcgacttgatgaagaagctcggtctatacaagagaagatccgactttcggaatatcgagattcggtacaatttgaaagtcggtgggccacgagagcttcggatatattgcaagctatcaacgagacaaacccgaccgttgttcattttagtgggcatggagcagatacgggtgaacttgtattagaaaatcctgatggaaccgctaagcttgtgtctgcagatgcaatttctacagctatggcaacagcttctgataccatccgtttaatcgtctttaatgcttgtttttcagatactcaggcggcgagtgtagttgagcatattgaagctgcaatcgggacatctgattctattcccgatgaaacggcctgtacattcgccgcacaactctattcttctattggttttgggcattctcttaagaaagcatttgaccaggcaaaggcagaattgatactcgaggggattcctggcgaagatattcctcaactttattgccgacctgatgttgaccctgatgatatggttcttgttcagcctaatacttaaggacgaggtctgccatcactatgatggtggacctcattcttacttgaagagcatatagataatgtaaagccagcaggatcattcttgctggctttactgcattttaggaggtgactttacattattttctactatacattagctcaatactggggtgtgccccagagtcgtaagaggatcttccttgtggcagatcttggagccccatcctcagcgcaaatactatttgagccggaaagcctgcctgggcattctccgtagagcgcggaagcgcgggaaggagttacctgcaacgctgaagttggcgttggaaatgcagagcggcctgcggatgatcgatttggtaatattggcgcagatggggcttatcaaggcgtaccatatcaaccagaggaacgagggtatcgacctgggcgatacggcgggggcgttgatggcgacctccaatttgcagatgcagacgttcgtggcgggcttctctgccggtgcgggagccagtgcgggtggcatcggttaccgcgagggcgttgcgccgacactgaaggccggcggcagcggaaacagtatgccaaccgtcctgtgcatcaacgatcagggtggcgagcgtatggacgtgacggtagataaaaccgtcacgcttcgggcgcagatggacaaccaccagccgctggtatttgagagccacggtatggacgctcgctatcgacagatgggcagtgtggctccggccatgtcggcacgctacggtacaggcggcaacaatgtgccccttgtgggagagcaggtgttctgtatcaccggcaacgctattgaccgcgagccggagaacggtggcaatggcatcgggtatcaggaaaacgtatcctacacactgaccggcttcgaccgccacgcggtgtgctctgtctcggaggtggtcggcgcactgtgcaaaggcgacgaaaagggcgcaggaagtcagtatgtggagcagggcaaatgcgttgtggatctctatacctgcgagcctgccggcgacaaggatctacccattctgctcatccgccgccttacgccgttggaatgtgagaggctgcagggctttccggatggctggacagatatccccggcgcgtctgacagcgcacgatataaggcgctgggcaacagcgtttattgggacaaagccattatgttaatgatgggcacaaaaatggcatgaatacaaggcttcttgggattttactgcacataatactccacatttcaacctttaatcatagcagctaaaacctttaaagtaagggcttactttttccgcttgttcaagtagaattgccattgtaataggagaaatttctacatgaagggcggtgggtatattgccaaacaagctaatcaaagacctcattgacaaaggtgcagtaactctaaaagaacagggatattccatacgcagtagcgaatacaccctattgacatggaagcaatttcaagagttctgcaataaaaagggatatgaaacatatttgccctcgcataaagatgaattcatcacagaactcggcaagtgcactccacctttaaggcagtccacaattgaccgcaaagccggaagcatgaaaatgcttgatctgcttgccaccaaaggtacatggggaaaggggatgctcaatcctctgcaagagttgttgccggaattcaactcctttcttgatgcgcaggaagaatacctcatcaaaaccggttattcagaatgcaccagagaaacgatgcgaaattatatctccgtagttatgcggtactttcagaatgctggtataacaaagctggaagaacttaacagctcacatgtctcggcatatctgctgacactgagaggccatgcaaaaagtacagtgcgttgtgaactcagccgactgcggaagttcctgtcgtatctgtatctgcttggatatacatccgaaaatcttgcacctcatgtacctgaatatcgtctgggacaagcacagagcataattaaaatctgggagtcagaggaaatcaatgcagtattggaaaccgtgaacagagccagcccaaaaggaaaacgagactatgctttcattactattgccgctgaacttggtgtgcgaagcaaagatatctgcaatttgaagttgtccgatattgactggaagctttgttcaatctcctttgtgcaaagcaagacgggcaagccgaacacacttcctctcagcgaaaaagtgggatctgctattattgactacctgcatattcgtccgcaaacaaaatgcgaatacctgtttgtcagtttgaaccctccatatggcaagatgaaatcaatccattcagcgttccataggtatgtcgcgcgttcaggggtaaaagtgccaattcatgcgcatcacggcctgcattctcttcgggcaaccgttgcgacaaaactgctatctgccgatgtgtctccagatatcattttttcatttcttggccattcggaccgcgaatctctgggacattacatccgtctggatattgaaaacctgcgtgaatgcgccctgtcgtttgaggatggtgatctcttatgagcagaacttacgagtacagaagcggactggcaagtcaaataagtgcttttattgcagaaaagcgggcctgcggatgtaagtatgaaaaagaagccaaaacctttcaaacattggaccggtttctcgtagaacaaggaatcaatactccagtgttgccggaattggtcgttgagaaatggattgaaaagcggcccaatgaaaagcgtaaaaatcaaaaatggcggcttaatttcacaaaacgctttgccaaatatcttcaattgaatggctatgccgcgtactaccccgaacttaccatttcatctcgagatgatgctgacttttctccctgcatttttacgagcgatgagttggcacgtattatgaaatattttgaaacgatggttccaagcaggcaatgccctactgcgcaccttgtctttcctttgctgtttaagactctgatctgctgtggattacgtgccggagaggcaacccggctccgtgtaaaagatgtagatcttataaacggcgttttgcagatttgggaaacaaagcatgacaaaccaagatatgttcctctgtctaaaagtctgtgggcggactacgaacaatattttgaagaaatccatgcggaaagttctggtaacaactatttcttccccaatccccgaaaaagctgctaccatacaaccacagtctacaaccggtttcgggatgcgctatggcattgtggaattgcgcataaaggacgtggatacggtccgagggttcatgaccttcgtcatacctttgccgttcgttctatgcaaaagctgaaaaaatccaagagcgacatcgtgactacacttccatacctttcggcgtatctcggccattgcaacatgagtgcgacgcaaatctatctgcatttaacagcggaatgttaccctgaatttattcaaaagcagtgcgattatcttggcgatacgattccaacgtgggaggcgccgaatgaaaactgctgattttgccgcacatttgacggagtttctttcccattacctgcccgaacttaaaaatatcagtacgaacacgatttcatcatactgcgatgcatttcggctattccttggctattgccaggatgtagaggggatgaggattgaaaagctttccatagatgatctgacgccggaactcgttgaccattttttgcaatggctgaggatagagcgaaacaatggaaccgcgacgcgtagccaacgtcttgcagccatccgctcatttgttaaatacctgcagataaaagagccgcgccttttgctgaatttccagcaaatactggcaatcccagtgaaaagagctgagcgcaaagcgattaatccgttgacaaaagaggcgattgcgctgatcctgcgccagccggatacatccactctcagcggcagaagagatgccactatcctgtgttttctttatgatacagcagcccgtgtgcaggaaatctgtgacttatgtattgaagatgtccgtcttgattatcctgcaagtgtcaagatccttggtaaaggcagaaaaaccagggtagttcccattttgccggcaacggcgcagaacttgaaaaaatatcttactgaaatgcacatgcttgcaccggaaaaaagtcatctgccgctatttatgaaccgcaacgggcaaaagctaactcgtgcaggggttacgtacatcctgaacaaatatgccaaggccgcttcagtgattgatccttccataccggagaaaattcctccgcatttgatgcgccatactaaagcaatgcacatttacgacgcggataatgatctcgttcatgtgcgcgatttcctcggacattccgacattaaaactacagacatatatgcccgttcaagtcttacaatgaagcagaaagctctggaacgagtttcggattctccagttccctcaatgccttcctggcagaaaagccggagtacgatggagtggttgaaaagttttgggtctcaaaaagcatagcacattatgtgaagcaactgcgccaggaatcctctcctggcgcagttttcacatctgttcttctcataacgaccatgattaaataaacactgttatgttgagcttcacataacgccatggccatcccctgcgtggatttcgtgatgaagtgtatggcggacgccatacggggaagtgattaaacataacttgtccattgtgcttcgtttgcgcctgcttcttcgttgtacttgtcaatagctttcccattgcgcttcggctatgctttgcttgcctcggagggaggcggaaaggagcacaccatggaggaaaagaaaaacctctgcgcacccattccgctgtcgctgcaccagcggctgcgtgcggagcaggagcagcgtggacagacgctggcagactacatcacggatatactcaacgaacattttgaaggaggagcaaaaaacatgggcaataccaatcgcaccatcgcctttcaggtaccggaggagctctttgaccgcctgaaggattaccttgccaaacacggcttgaagcagaaggacttcattctcggcctcatcgagcgggagctgaacgacgcagtggatgcggaataacaacatgcagagccgcaggcgtgtgcctgcggcttcacttttggaggaaaactatgtacctataccctgaaaatctgacggctcgcccaatgctgtggatgtggacgctgcgggacgtggcgttcatcggcatcggcctgctgctgtcggcactggcactgacgcaggccggcaccgtggttccgctggtggtcacagcggcactggcctttctctgtattcggcacggcggcgtcagcatgctggactttctgcgctacgccgcagcgttcttctttttcgggcagcaatactacgaatggagggaacgagtatgagaaagaaaaagtccacgcagcagctggtgggcattgagagcgtgacggacagcagcgtgctgacggcaggcggtgagttgaccttttaccttgtgcagcctactaacctgaacgtgctgccggagtcgggtgtccgcacgagggtgacagcactgctgaatgtgctgaagacctcggcagagatggagctgctggcgttagactccaaggagtcctatcaggataaccgtctctattatcggcgcagaacagaggaggaaggcaatcccgctattcgcgctctgctggcgcaggaccggcggcatctggacgatgtgcagaccatgatggcatcatccagacaattctgctttgtgctgcggcgcagaaagacggacggtgcgatcaacctcgcgacagtggaacagcggctgcgggacagtggctttaccgttcgccgagtggaaggagcggaactattggagctgcttgcgatttattttgaacaagacgccacccacgaggcgtttgacctcgtagacggtgcgcattggctgacggcggaaatggaggaagaaaatgcggattttgaaagttgaaccgggcgaagtgccctatgtaaaggatatgaaggatgggttggaggcgattcagcaggaggtgcagggactatttcagccggtatatgtagaggatggcgtgatcctctgctgcaatgaagagggaaagctcaatggcatgaagcccaatcggtggctcgaggatgatattatctgcgggccgtttttcctggtgggggatgaccatgagggcggcttctgctctctgacagacgagcagttggatcggtacacgcagcgatttcgggagccggagcagtttaccggccacgaaccggagctggagccgcgcatggaatttttctgctggtgaggtggatggcatgaaaaacccgtttcacaaaaaggagatctcgccgcaggaggcatttatccgctcctttctggattgcatcgcaccgggcgtggtgaagttcgaggtggatcactacatcttcggcaatacctaccgctgcgtctgggcgctgcgggaataccccgccagcactgaatctcaggccatcctgcggcacttgggcgaaaaaagcggcgtgacgctgcggatatattgccggcaggtgtcccccggtgaggaggacaggatcatcgacaatgccaacaagaagaacaagctggacggttcagatcctaacaagctgcggcaggcagtggaggccgagagcaacctgcgggatgtggcggagctggtgcataagatgcaccgtgagcatgagccgctgctccactgcgccgtgtatctggagatgacggcggacagcatggggtacctgcggcagcttcagaccgatgtgctgtcggagctggtgcgctgtaagttgaatgtggacaagctgctcctgcggcagaagcagggcttttactgcgccagtcccgtaggctataacgcccttggccgggagttcgaacgcgtactgcccgctggcagcgtggccaacctgtacccattcaactactccggtaaaacagatcccaaagggtcactataataaggatagaaaggtcgtgaaaatacaaaacaggaggttacacacatgaggaagcaggagcaaaagggtaaaatcacagcattgtacgaaaggttatctcacgacgatgggcggtctgacgagagcgtgtccgtagaaaatcaaaagcgcatcctggaggactacgcccgaaaaaatggcttcactaatgtccgccacttcaccgatgacggggtgcggggaacgaccttcaagcggcccggcctggacgctatggtggacgagatacgggccggaaatgtggctaccgtcattgtcaaagaccagagcagaataggccgtgacgtggtggaggtcggcttgctcaaacgcacctttgacgagtacaacgtccgctttatcgccgccaatgacaacctggacaccgccaatggatttgatattatgtccatcttccgggatgtgataaatgagtggtacgttgctgacaccagccgcaaaatcaagaccgttttcaagtccagaatggaaaagggcctgcgctgttcgggggccgtcccctatggctatctcgcctcaaaagaagaaaagggcgagtgggtgatcgacgaggaagctgccgccgttgtgcgccgcatctttcagatggtcatggacggtcagagcgtcaacggcatcgcccgaacgctgcgggccgagcaaatccccatcccttccgaacactggaagcgtatcggctgtcctgttcgagccaacagctaccgcgacccctacgcatggtctgccaccaccctgggttatattcttaaaaggccggagtacctggggcgcaaggtgctgggcaagactgtctgtgagaactacaagactaaaagcacccgcaggacaatgccagaggaacaatttgtatttgagggagccgtccccgccatcattgacgaagaaacgtggcacaatgttcagcgtttgcgggaaaccaagcgccggacacccaagcggagtaatgcccctaaccgtttaaccggactgctctactgtgccgactgcggcgcaaagctgacccaccacaacagtcttgtccaaggcaagtacattgacgatgctttcacctgttccagataccgggcacctatggaggattgcaccattcactatgttgccacgcaaaagctggaagcggcgatcctctccgccatccagcggataagctggtatgtccgcaacaacgagcaggagtttgttcagcgggttcgaaaggcatccagtctgcgccaggaggaagcagtcaaggattgccggaaacagattgtccaggcgaagaagcgccacgccgaactggacggactggtgaagaagctgtacgaggccaacgccacgggcaagctgccggataagcatttcagccgtctccttgccgagtatgacgaggaacaggccgcgctggaagcctccatgacggagtggcagggcttgctggacaactggaacgccgaccgggtgagaatgacggagtttatcgaccttgccaagcggtacaccgatttttcggaactgactacgcccattctcaatgagtttatcgagaaaatcgttgtccatgagggcaacggacggggaaagcagcgccgtcagcggttagatttctatttcaatttcattggcgcgtttgaggttcccgccgacattgtgaccccgatggagcaggaggaagaacgccgccagcaggaggaacaggcagagaaagaggaacgctcccaggtgcttgcccaggttcggtatgagaggtacaagcaggagcgccgggagtttaccgcgaggaagcgggcgggcctgttgaccccggaggaacaggcggaggaagaacggcggttagagcgcaatcgggcctatcagcagaagcaacgcgacaagaaaaaggccagtcagccagagaagcctcgcaaacgctcactgaaggaactcgccaagctggatggagccgatctcaccccggaggaagcggagcggcttgcggcgcaccgccagaagaaagccgagcagcacaaagcgtggcgtgacaggcagaagtccgcacagcccccgaagccccaacagcggacgttgaaagaacttgccagatgtgccgaggcaggtttgcctctcaccctagaagaagcggaacggctggaagcccatcgcaatcggaaaaaggcggctttgcaggatttgaaagcccgcgccgaaaccgacccggtagcggcggcagagttggcgcagcagagagcgcaacagtcagaagcggtaaagaagtcccgtcagaaaatgtatgcggacgctgccgccggagatcccgaagcccaggcccggtatgaacgtatgcttgccgcgaggcgggagaactaccacaggaagaaacaggcagaagccgaagctgctcaagtcagctaacgtagatacagaaaacgccagggacaacgatagtccgtggcgtttttgtcattactgccgttccagcaaatccatatatttctgacgttcgccctccgggactttcagcgccgccatagcctgttcaatggtcagccccatcgtttccatgaggtttttgatagaggacaagatacctttagcaacgcctttttcctcaacgcccttgctcaaattacacatgaccgacacctccctttccattgtctgcgtcatttgaatgtcgtaatcgtcctgcaaaattttccgcttttccgcctcgctggtttcgttggagagaagcacatccagcatccgcaatacgccgtcataatttgacccatccggcccgccaaggcacagcatgatgatggacagcaaatcataattcctgatgggttctttgccctcgccgaccagatattcttccaccagccgataccgggtaatggtgttctctcgatactgcggcggtttcatgcaaatccagatggagtagaccttcttgattttctcataatgggagccagtgaactccctgccgtactgggaagaaatcatgcggcaacagtagtatatgccacgctttatcagcggatagccggggtaaaaatcgttctgggcctccacgttgatgatgagggcaatttgttcctcggagtcgggaacgatggcgcggaagcgaatgtcataggtgactgtcccctcgcgcaccgatttgtcctcggtgtccatgccgctgatgactgtgccaccctcgtccggcagcaccgggacggcggacacctggggttggccctcaatgtacttctcggcaatatcattgacatcgcaatccttgtattcttccaggcaggacttcataatccgcgccaggattgccttttcagacaggacacgcttacaggcggcatcataacccgcgctgtcatctgtgacgtgcagtccctgggcgattgtcgttttgagctccaccatcctcaccttctttcgtttcattctaccacagctttgccagcgcgtccacttcttttttgaaaagagttgcgtatggcgtatacacgagagagatatggaggtgcagtgacagaaaaaatttatcttaacagggttgcttttgggaatttgatatgctatactataaaaatccaagcaaaggagtttatcaatatgcggcaaggtattcttaaataaaatttgataatgggaacaaagacaaacgtcctcaaggagagggcttggtttttgtacccaatttaagaatacttttgccttttcatttcatatcgtgatagacaacggccagccttggccgcagttttcatgtgtgtcctacctatcatccccagcggtaaaagtatttgtcgctggggatttttgcgcccttctgggccttgtatggaggacaatcatatgaaaatcatcaatattggcattcttgctcatgtagacgcaggtaagacgaccttgacggagagcctgttatataccagcggagcaatcgaggcgcccggcagtgtggatcagggaacaacgagaacggacaccatgtttttagagcggcagcgtggaatcaccattcaaacggcggtcacttcctttcagtggcacgattgtaaggtcaacattgtggatactcctgggcatatggatttcttagcggaggtctatcgctcccttgccattcttgacggagcgattttggttgtttctgcaaaagacggcgttcaggcgcagacccgtattctgtttcatgctctgcaagtaatgaaaatcccaactgttatctttattaacaaaatcgaccaggacgggattgacctgccaggtgtgtatcagtctatccgagataagctctccgcaaatatgattattaagcagaacgtgcagctttccccggatatatccatcatggaaaacatggggctggagaattgggataccgtgattgcggactgtgatgaattgttggagaaatatattgccggagaaccaatggacaaagaagaacttctgcgggaggaaaacaggagaatccaaagcgtctctctgtttccggtctatcatggcagtgccaaggtaaacttgggaatccgacaactcattgaagcggtcacagatacattccaatcacccaccgggcagaacagctctgaattgtgcggaactgtgttcaaagttgagtacgcaaaccagagccaacgccttgcctatctgcggttgtatagcggtacgcttcatttgcgggattccgtagccttggcagggaaagaaaaactgaaaattacggaaatgcgtatcccctcaaagggtgagattgtccgaacagagattgcccatgcgggcgagatcgtcattgtaccctgcgacagtttgcggctgaatgatgtgctgggaaacaaactgctgctgccccgtgaaacgtggagcgacaatcctctccctttgctgcggacaacaattgcaccagagaaaccagaacagagggaacgcttgttaaacgccttgacagaaattgcggataccgacccgcttctgcgctatgaagtagacgctgtgacccatgagatcattctctcctttttgggccgggtacaattggaaattatctctgatcttctggtggaaaaatatcagctcaacacaactgcaaaagaacctaccgtcatctatatggagaggccattgaaagcggtaagtcacaccattcatatcgaagtgccgcccaatccattctgggcgtccatcgggctgtccgtcacccctctcccccttggcaccggagtgcagtatgagagcaaagtttccgttggatacttgaatcagagttttcaaaacgctgtattggatggtatccgctacggtctggaacaaggcgtgtatggatggaaggtaacggactgtaaaatctgttttgagtatgggctttattatagtccggtcagcactcccgcagactttcggtcattggcacctattgtattggagcaggtgttgaaaaaggcggggacgcagctattggaaccatatctttcttttacactctatgcgccgcaggaatatctctccagagcttatcatgacgcaccaaaatattgcgcgagtattgaaacgacccaggttaaaaacagcgaggtgatttttactggcgaaatccctgcccgctgtgtgcaagagtaccgcaatgacctcaccttttatacaaacgggagaagcgtttgtttaacagaattgaaggggtatcaaatcgccagcggcgaaccagtttttcagccacgccgcccaaacacccggattgataaggtgcgccatatgttcaacaaaattctcccatcaatgatggacttataaaatccctttggaacaaagggcgcacttctatacatggtctgcgaccatgtatcgtgcgctctgcgaggctacggcccggacttccgaaagtccgggccgtttgcgtcgctccgctccgtacaaggggctgcgccccttgcgccgctttgcggctatccctgcgccctcgctggaaaggtacatccgctctgcgtctgcacctttccagcgaggctaaaaccgaataccgttacccttgaccgtttacccgacacagcaggtagacggtcttttgttttgccaagaaggaggtcaaacacgatggacaagtcacgcgaagaattagagaaagagtatgctgaggccaccgctaagttggagcagtaccagcacagaggccagcggtatgagaaccgcatccgctactacacccaaggcgaaaggaagaagcgaaaccaccgacttatcacccgtggcggagcggtggagagtatcgccccggaggtgcgcggcatgagcgaaagggccttttttcttttgatggaaaaggtcttttccctgccggaagttgccgccctggtgagccaagccactgaccagcaggaaagcggataattggccctgttccatctccacgttacccaggtcaaacggagcgcgggacagtctgttgtcacgtccgccgcctaccgagccggggagaaattgtatagcgaatactatggcgaggtcagcgactacacccacaagggcggcgtggtctgcacagacattctcctgccgccccaggcccccaaccagtaccaagaccgcgccaccctctggaacgccgtggagaaggccgagcgcggcaagaaagcccagcttgcatatagctttgacattgccttgcagaacgagttttcattggaggaaaacatcgctcttgcaaggcaatttgtttcggagcagcttgtgggccggggcatgattaccgactttgccatccaccagccggacaaggaggacggcggtattcctaacccgcactttcatgttctctgccccatccggcccattgagccagacggcaaatgggggtgcaagcagcgccgccgctaccgtctggacgaggacgggaaccgcattatgggagaggacggcaagcccctctttgacgctgttcccactaccgactggggaagcccggaaacactggaacattggcgggaggcgtgggccgctatggtgaacgccaagtttgaggaaaaggggctgacctgccgcatcgaccaccgctcctatgagcgtcagggccttgacctgctgcccaccgtccatgagggcgtggccgtccgccagatggaggccaagggcatccccaccgacaagggcgatctgaaccgctggataaaaaaggccaacaacattctgcgggatattcggaagaaaatcgccggcctgacggattggattaaggccataaaagaagaattgagcaagccccaggccccgacccttgccgccctgctgaccgactactatgagggccggaacgccggagcatggagccgcaacgccaggattggaaatcttaaaggttttgccgaggccatcaattttctgaccgagaggggcatcgctacgctggaagatttagagacccatatcgccgcccagagtgaacgaacggaggccatcaacacatccatgaaagcgaagcgtgaccgtctgaacgaattgaaggaactgcttcgccttgttgacctctaccgagacaccaagcccgtctatgacgagttgcagggtatcaagtggaagggcaagcgggaaaaattcgagagggagcatgagaacgagttgaggacgttccacatggcccgccggaagctggacaagcaccgttcccctgctggtaaaatccccgttcatgcgtgggaacaggaacaggcgaggcttcaccaggagtacacagccgagtatgagcagtacaagcctatccaagacgatttgcggcggcttcaacaggtgaagcggaacgccgatgctgccatacaccagcaggagcagacccagcagaaacgccgggaggtggagcggtgaacggcattccccgactgacctaccagcagtaccgagccgtccggcggctggtgcatgactgctgcaattatgacggcggcaactgtcttgctcttgatgacggctgggagccttgtgtctgcgtccagagtatcacctattccctggtctgtaaatggttccgcgccgccgtcctgccaacagacaaggggttgtgtgccgccttgctccaccgaggacaggcgcggccctgtgccgagtgcggggcgatgttcgtgccgcgctccaatcggggcaaatactgtgacgagtgcgccgccaatgtgcgccggagaaagaaagctgccagcgaacgggaacgccgcaggcgtggacatttagaggctgaaaagccttgcaatcagggggcttgtggacagtcctcaaagggggactaatacattccccttcccccactccaacgtgggcggcaaaatggcgctcacgtggattaactttgatgaatgatgaaaggagagcctatgacctacgaccccagcatgacgatcaccagcaccatccccgccccggaggggagcgacagcaccagcagagagggcaaggccatccccctgcccgtgatggcgggcggcaacgcttcacccgccccggacgtaccgccacccgatatggtaaagaccgttggcggtacgacctttgatatttatttccatttcagccagaccagccgggaaacctttaccgacaaggtactgcgccttattcaatccgatgttgtaacctcataaaaataatttacttttttctctatccttattgacaaaacccgaacggcttttatattggcaaggataaatatggaagcaacatcgtggtggatttcgaccgccgcgacagcgacaagacctctgccaatatcctcatcctcggcaacagcggacagggcaagagctatctcatgaagctgctgatctgcaacctgctggaggcgggtaagtccgtggtctcactggacgcggagcatgagctggaggagctttgtggtaagctgggtggctgctttatcgacctgatggccggcgagaagcgtatcaatgtgctggaggtgcggtactggaatgaggacacagagacagacgagcctgcgccggaggccttccgcaagtccacactgctggcgcgacacatctcctttttaaaggacttcttccgtgcctacaaggacttctccgacccgcagttggataccattgagatcatgctgtccgcgctgtataaaaaatggggtatctcagaggaaacagacttccgccggcttatgccggaggactaccccattctctctgacctgtatgcgctcatcaataatgaattggtgaattacaggaacggcagcctgtacacgcgggaactgctgcaggaggtgctgctggggctgcactccctgtgcgtgggtgcggacgcgccgttcttcaacggacataccaatatctccgacgacagatttttggtgtttggcgtaggcggcgtactgacggcggccaagagcctgcggaacgccctgctgttcaatgtgctggcgtatatgtcggacaggcttctgacggcgggcaacacggtggcggcattggatgagctgtacctgtggctgtccaatccggtggccattgagtatatccgcaactgcttgaagcgcgtgcggaaacgggattctgcgctgatgatggcgtcccaaaacttggaggatttcgaccaggagggcgtgcgggaaatgacaaaaccgctgttcgctatcccgccccaccagttcctgttcaatcccggctccattggcaggcggttctacatggatatgctgcagctggacgaggcggagttcgagctcatccggcgcgcacggcgaggcgaatgcctgtttaagtgcggcgcggagaggtatcatctgaaggtcatagcaccggaccataaggcggtattgttcggaacggcaggtggaaagtgatggccgcgcccgtattggcacgagcagcggctgccttgctgacaaatgaggatggccgaaaggccatcggttgggtattggcgttgctcttgtcgccgcttattatactggcggcgttcctgtgctgcttcggcgatggcgcgtcacagcacaacaacgccgtggtatccgcagcgttctatggcgcggaattgtcgagccagattcctgcggaataccgagcgcatatcacagagatgcaggaggcattctcgcttttagattcggcgacagtctatgtcaatcagaaagccgaggaaggcggccttgaccccgtacaggtcaaggctattttctttgccctctgctttggggataacgcgccgacccgttccgcggcagaccgctttgtggactgcttttataaaacggaaacacggacgcgcatggtaacggtgacgcaggaggacggcacggaggagctggtagaggagacatacgaggtagctgtgccgctgtcggtggaggatgtttacgaaaaactcaccacatggcgtggccgcgtggtgacagatgcggagcgcagcaacgccgtggacatctacgccatagtcatgggcagcatgggcggcgacactttcaacggtgcgtatgagccgggcggcagtgcgccgatcgagttggatgcatctatgctcaccgacccgactacgaagaacgccgccgaccttgtgacctacgtcgccaatgcgtggaactccgggtggggctatgtgtggggaacctatggacaagttctgacgccggaactgctgcaatataagctgacgcagtatccggatggcgtaggaaagtacgcggacttcatccgcgccaactggctgggcagacacactgccgactgcgtggggctcatcaagggctacggctggctgtccaccgacaccatgaccatcgactacggtacacatggtatgccggacatcggagccaacgagatgtactacagcgccacgcgcaagggtgagatcgcgactatgccggatacgccggggctggcggtgtggaagcccggacacatcggcgtatatatcggcaatggtgaagtcgttgaggccatgggcaccaagtatggcgtagtcaagacgcaactggaagatcgcggctggacgcactggctggaggtgccggggatcgagtatgaataaggaggcaaacatgacagagaaccgaaatgaaaaactgctgaatggggcgctgcgttacatcgtcgcgcatatccccggtgaggaggcgtacagatttctgcacagccaaatgggtatcagcaacgaagagctgatgcagtatgggctgaatgacctgcgggagtattttcaatatgagtgggaagaaggaacgctgaggagagaattcgcagatcaaatggacaggctgctgccgcagcccgatgtgcatactacctctgcgtggatatccttcgccagtgagctggcagagggagtagagacttctttcgtcttggaagcgaataaactgctctctgccttccgcgaaatcgcggggaacttcagtcccaatgtcgtggacaccgtctatcaggtagtcctcgtgccaaacaatgcgctgctgagtcacgagatattccccgcagctgtggcggcggagcagggggcggatgtccaggcgatatcagacatggccgcaagcggttctttcgagggcggtcggatggatatccagcagatgtaaacggtggggtcaagacaccgctccaaggtcgcggctggacgcactggctggaggtgccggggatcgagtatgaatgagggtaatctgtaaaagttgattgctattctcaggtgtatcggctataataatggcagaacaggttaaaggaggtgccaccgctatgagtacgctgtcgctcagtgaggtcaaagccgtcgtgaaggaattgctgaaacgctaccacgcggaatatgcgctgttgttcggatcgtatgcccgtggtgacgccacacccgattctgatatcgacatcattatcgtgggcggaaaagactttgtgccccgtaacattttcgcactggccgaggacttgcgtgaaatgactgggcggaatgccgatgtgtttgagatgcgggaggtcaatacgggaacgcctttttatgagtccgtaatgaaggagggtatccgtatcgcatgaagaagacagatactgaacggttgaagaagattgtttccctgtgggatgcactgagcagcgagatcgaacggcggggcatcacacgagagatgttgttgactgagcagttttctcaatgggcagtaaccacgccggtctataacatcggtgaacaggtctatcagctttcgccagagttcaaaaaggaacatccagacattccgtggagcgttgtctccgggctgcggcatcggttggtgcatgattatgacggcatcaactggtccctgatcgcagacgtcatctttgatgacatgaacccctttgtagaacaagttaagagcatactatcagagtgaatagaaacaatgaaaagcgcaggcgaaggcctgcgctttttctgtgccttgcaaggaggaaacgacatggcgtatgtaaaggaacacgcaccgtcagaggtctaccacctggcgaagaaagaaaacctgaacagcattctggatgacggcatgatccgccgtttcagtgatacggaatgctggttctgtgccgacctgcaaaagatgagagcgtacatggagcagacggtcatgtgcgagggcaaaccctactataatgtgacaggtcaactttgccgttatcccaaatttgtgccggaggactatgtcctcctcaagctcataccctgccgacagaaggacaactggtatcgctgggagcaagaaatacctgcgggaagccctgcggcgctggtcagggcagcgcgtgaattctccgcgctgaagatcggctaccgcggtgacctcgcatttcacaatgcagaggtcatcgatgtgccacagtttcttgtggagggggtcacacagggcgagccggtgcagaccaacacagagctgtgggacattctctcccagcgcatcgaggatgagatggccgattatatgcgtcggctggatatgcgtacccgcgacgaactgatacagacggcagacgagatcgacgccatgatgacctgtgactgcgagctgaggctgctgagagagggcctgccacgcgaggagctggtcttcctgttggagcaggacagaccgttggagcagatgagcaaggcatggatggcgcatcggaatgtggatgtaggtgagacattccagagcctgctcaccggcctgtatgcagagcggcagcacgatatggacatgaaaatgtgaggaggcacagcatgggagaaaccaatatcaccatcaattttgatgcggccaagctggatgcgttggaattcgcgctccgcaagcagcggtcgtctgtacagcggcgtatggcagaaatgctccaacaactctacgagtcggaagtcccggaagcggtgcgagagtatgtggacagtaaggcggtgcctgccgcaaggcccaagcgaccggcaaaatcggtcgcacccaaggcgcagatcagcgaagtgagaccgaaggaggacaactgatatgggaatacaggacgatgcggctgttacctgtgctgcgtaccgtgtaacagaaaacggacagacgtggtacttcacgaccttgcccggtgaggaactgctggatactgcgcagatgctccgcaggtactgcacgagtacagaacacagcaccggcaaattcatctctctgtatttgcatgcgcggcctatcacatcggaggagtaccagcaactgatgcagctccgtatggagaacacaggagaggtcgccggcgtgtttgatttggattttgacaagcgggagttttccgcagtccacatcatgaacggctggacaacgtgggcgatgcgggatgtgatcccgtctatccatcaggccacaaggccgcgcttcgcaacggcggaggaacagctccgcaaactgctgaatctgttggacggcatggagctcacatcggcggggcatctcaccgcgcagaatttttcgttcagtgatgagatcctaatagaaaacgggaagctgaatttttatgtgcaggcggacttcgatgtggatgccgccttcggcaccttcgtgtgtacagatgagaacgatgactggctgaacatctacgccaactacgacatcgtgcgggataggccgtgcgatacgctggagctgaatctctgcaagggcgacggtacagaggagtactggagctatcatctgaacgctgccgagcaggaggtgctggcgcggaagatggaggcgttttgccagcagcaaaacggcatgagcctgcacgatttcgcccggcagcttcaagaggagccgaggccgtctccgcagatacagatgtagccccgtgtttgcccttgtgggccggtttgtggcctcgcggggacgcgggagggtaaggatagcggccccggagatttggagcgtttttgcccgcttttcggtgcgccgaaagcggagcaggagaaaagcattggcgcttttctgcgccaatgccggtcacggcagcccgcagtgcggactgccacgagggtttgcggcattttgcgattggcgctgattatcgaattccaaatgtgctttggcgctattctttgtaaaaatgcccgtcagccccgtgtttacaaggctttcgggacgcgcaggaaggaggtgtgactcgatggataaaaatgggaaaagccggcactctgtttggctgtcagacgacgtgtggcgggaggtggatgcgctctataagctggataattgccccacccgcaacgagttcgtggagaaggctctgcggcagtattgcggtcgcttacacgccgagaggacgggcacatatctgcctcgcgcactgcaagaggtgctggagggtacgctgggcgtgttcggtgaccggctgggcaggctgctgttcaagctggtggtagagcacaacatgaccaaccatctgctgggcggcgacgtggacatgacacgcgatgagtacagcaagatgcgcggcagcagcgtccgtgaggtggcgacaactcacggcaacatctctttcaaggacgtgctgctgttccatcaggaggagtaacgcatggcgcggctgatacaaaaaagtggctacatcaagaacggcaaggcaaccggctacatggaatacgttgctacgcgggacggtgtagagatcatccagagcaccgagcctgtgaccaagaagcaggagcaattcatccaaaaactgctgaaggacttcccggacgcaaaggagctattcgagtacagtgactacctacagacgcccaatcgcggtacagcatccgcatttatcgccgtggcgctggatacacatctgcacgaagtggagtccgagagcggctatatgtcctatatcgcccagcgtccccgtgccgaaaagcacggcggccatggcctgttcagcgaggtggacaccaccgacctcaaggcggcgaaggccgagctggacgctcacgacggaaaagtgtggacgtttattttctccctgcggcgtgaggacgcggagcgacttgggtacaacaaagctgccgcgtggcggaatctgttgaagcatgagagcgccgctattgcggaggctatgcggattcagacggatgatttccgctggtacgcggcgtaccacgacgaggggcatcatccccatgtgcatatgatggcgtggtcggcggaaccgaagaaagggtatctcacgcgggagggtatcgcagtcatgcgttccaggatgacgaacgctatcttccatgaggagatgaaagaactctatatcaagaaggacgctgcctacaaagagagcatccagaccgcgaaagagtcactgctgctatatatcaggatgctggagaacagcgagtcagctgaccccgtgatagagcaaaagctgtgtaacctgtcccacgcattggagcaggtcgatggcaaacacgtctatggctatctgcccaaggaggtcaaggcacaggtggacgagatcgttgaccggctggcgcagctcccagaggtggcggcttgctatgaccaatggtggcggctgaaggatgagatcgccggttactacggacggaacacgccgccccatcagccactggtacagcaaaaagagttccgtgccatcaagaacttcatcatccgtgaggcggaaacgatctgtgaacccacgccggtgcagacgagtacagatgcagaaccgagggagtcgcgggagtcttctgatgaaacaccgaccgcagtgcagcagccgctgccagagatgccgagaaccgctctaccagccgatgcggtcatgcagctgctcctccacatgagtcgtatgttctgcggcaatatgccggtcatcccgcctgcgctgcgtatcgactccaagcgccgcagacggttacaggagaaacgtatggccatggggcacaagcgggacgaccatgaggagcaggagcgcttgcggaatgagcagatactgtgactatgaaatttctcttccgctttttcgttctgtgtggtattctagttctaaaagtgaggtgagccactatggccaaaaaacagataaaccgtcggatcgccgctgtcaaaacggcagatgccatcaatgccatagagggtgctcccgtatctcattatgcgaaaacgctgtccaatagctgggcgagaggtgagatcacaggagaacagatgaaggcggcactgctggcttctcataggaaaatggcggtacaggtgcagagccatacctgacatttatctctatgatggcgtgccggtgctgcgcaacaagctgcagattaaggacgaaaagaccttagaactgatcgaagccgaacagtcccgtgccaacatgatgttgttgtatgagcaaggatttcatatttctgagtatgagcatttggagaagattttgctggatgccatttgcgatgaacctgttaagtatgatgaagtcccgtctgcaaatgaatacagaagcacatcacaggagaaatatcggaaatatcaaaaagagaaatacacgccggaacctcattatcaacgagaagaatagaaagaagcgggtcgctatgcggctcgctttttacatgaggaggattatgggcaaatttgtatatttcacatccgcggagaaacggcaggccaacgaggttgacctgccgtcttttctgttggatcgaggcgagaaactcattatggccggacgggattaccggctggtcagcgatcacagcatcaccgtgcgcgggccgatgtggtatgaccatgccgcacggaagggcggacgcgccatcagctccgtgcagcaattctacgacaagacctatcccgaagcggtgactatgctgctggggcgggacggtcagggcatcatccccatcgtcaagaaagagcctgagccgcgtgagccgaagcctttcgcgctgccggaggcctatctcaatatgcggcggctctatgcctacctgactactcaccggcgcatcgaccgcgacgtggtcacggcgttcgtgcgggagaagctactctatgaggatgccgcgcatcacaactgcgtgttcgtgggcatggacgagcacggcgaggccaagcacgcacatcttcgcagcacaagcagcagcggaaaggtgttccgtatcaatgtggagggcagtgaggcaaagcacagcttccacaggaacggtacagatcgatccctatatgtctttgaagcacccatcgacctgctgtctcacatcacgctctatccggcgggatggctggagcatagctatgtggcctgctgcggcacatccatccagccggtgttggagcgtctgcggcagaatccaaagctggatacggtctatctctgcctcgacaatgacgaggctggtgaggatgcctgtgaaagcatgatggaagtgctggaggagatggatgtggacgtggagcgtctgcgtccgcagggaaaagactggaacgatgacctgtgcgcgaagcgaggcaaagcgaaaaccccgacagcataaggctgtcggggtaaattcatgtcactgttggtagcgcaatagcaaagaacggagtacgggcgtgaaatcctcacagatctgccgtgcgatttcggtggcggtagcctcatcgtagacatgggaggtaatatttcgtgcggaaatgatcgcgttccacatatcggcatcgtcgattatgccggcggcataggcgtccttcagcacagcgcgaggcgaaacgacggcgagcacaacgccctgatcctccaagtattcgcggagcgatttccacgccagctccactgtgaactcaaaacgttggatcagtccatcacggtacaacgtatcctgcggcgctgcaagatagcttttgacggcatcttccaactgtgcaaaggcacgtttatagttttcaatcttctgcagcatacagtgttacaccatccttctcgatgttttgcagaaacgcgggttccatattctcggagatatgcacgatatccagcttcaagagcgtgggaagatcctctgcctcaagggaaaagccgccgcgctgcttctcgggcataccgtatacagcgaggtcaacatcgctgcgtgcgtggaagtctcctctggcgcgggagccgtagaggactaaccgctgtgcaccataccgtgcggcaagatttgcaagttttgtgtatagctcgtccatgcgtcctccatcaagatatgtcgcttcacatacttatcataccactttttcacatagtaacacaaaacagctaaaaaggaaaggcgctatgttcaacagtatttggcggcaatagacgtaaaatggctaccagcacaaggctgctgaaaccttcattcatccaacatcaactgtccatccaacgcctgctgctttaaccgctgaagctgttccttttccagctgggcaatgctcttttcgggagtgggcagatcttccggcattgtgccgccgattttttcgatggcttctcgtacttcactgccgaccttgtaatgaacggcggtggcggcatcggcactgttcacactatctttccgcagcttctcctcggtctgagaaatacggaacaggtttgcaatcagctctgtgctgcccatgtagtcgaggatcttttgaccgacttccaagttctttttgcggtgaatgtcatccacggtcatgccgccgtataatcccatgtacccggcattttggaatacggcaaattcatctgccgtgatcacaccggcgtttctggctgcttcggcaagcagctgattccactgcttgatgtcgccgcgcacgaccagccggcggctgtcttcgtccagctggttaaaacgggctgccacttcctgccgataggtttggatggcgaaataggtttgtcccagcgcgatgacctctttgcgcggatcaccgttctgcacaatcagatagcaggcgtagcgggacaactcatagtcaacaagctccttcacaccgccgtgaggcataggcgatgttttcctgacatcaggaaaacattcggcaacgttatgcccactgttttcacaggcgatcatagcgcgcttgatgaccttggcaaagttttcccattttgcataatccaggaccggagccagttctctggcataccaatactcggaaccgtcagagcgcgttctgcgaatgtcctcaaagcatttatattcggtggcaacgagatggctcatgtagtgtccctcccctatttttacagggtaatagtaacataaatcgataaaaaaagaaaggagaaatcctgtgacagataacctctggatactctttgcggcggcaggcgtcatggtggcggtcatcgttacgctgtcgctgttgggcgaccactacacactgaacaacatcaagtccaagaccgtgggcgacgggcagcatggcacggcgcggtgggcaaccgatgcggagctccgcaagacctacgccctcgtccccttccaagtgccggactggcgggcaggcaaaaatctgcctgaagcgcagggacttgtgctgggcagtatcagcggcaagcacggtatcaccgcgctggtagacaaggacgatgtgcattgtcttatgatcggcgcatccggcgtgggtaagacagcgtactttttgtacccaaacttggaatatgcctgcgccagcggtatgagcttcctggcactggataccaagggtgacctcgcccgcaactatggcgcagtggcggcacggtattatggctatcatgtttccgtggtggatcttcgtaaccccacgcgctcggatggctacaacctgctgacgctcatcaatcattatatggacatggcacgaaagacaggcaatctcgctgcacgcgccaaagcggagaagtacaccaagatactggccaagaccatcgtatcaccgaacggcgacacagactacggacagaacgcctacttctacgatgcggcggagggcttgctgacatccgtggtgcttctgctggcggagttcctgccgccggacagcaaatgccccgcagagcgccgacacatcgtgtccgtattcaagctggtgcaggaactattagcgccctccggcgttcgcggcaaaaactggtttgcgcttctgatggacagactgccagacatacacaaggcccggtggtttgccggtgcagcgctggatgcctccgaacaggccatggcctccgtcatgtccacggtgctgtcccggctcaacgccttcctggactcggagctggagcaggtgctgtgcttcgacagtgccaccaacgccgagcagtttgcggcggagaagtccgctatcttcctcatcctgccggaggaggacaccaccaagaacttcatggcagggctgatgatacagacgctggcacgggagttgttcgccgtggcggacgagaacggtgggcatctgcccagccgcgtggtgttctattgtgatgagttcggaactatgcccgcctttgatgtggaggcactgttcagcgcgggtcgctcccgtggtatcacactggtacccatcatccaatcgctggcgcagttggagaagaattacggcagagaaggcgcagaaatattgactgacaactgtcaggataccatcttcggcggctttgcgcccaacagtcagacggcggagcagctctccaaatcgctgggcagccgcacggtgctcagcggctctgtcagtaaggggaagaacgatcccagccagagcttgcagatgatagagcgtccactgatgacgccggacgagctgaaatccattcccaagggcagctttgtggtgatgaaaacggggacgcatcctatgcagacgaagctgcggctgtttctcgactggggcattaccttcgatgcgacctatgccacaccggaacacgcggcgcggcctgtggcctacgccagccgtcaggaattgttcctcagtatcagcaaaagatatagcagcagtgaccagcccgcacaggcgcagcaggcatcgaccacacagagaagagcacctcgctcggccatggggctctacagcgaggacacaaggccatgagctactttggaagcatctatgcagaccaggacttgtctcaccgagcaaggacagtctatatgtacctcaaggatcggtctgacgcagggaatacctgctggcccagcgtccgcaggatcgcggaggacttgaagctgtcccgccgcaccgtgcagcgggcgttgacagatttggaacgtcacggtttcctggagcgcacccatcgccgccgtcccaacggcagtctgaccagcaacctgtaccgcgtcaagtgagcaggaaaagagcgcacctcccgccaagggagaggtgcgctcttgaactgtcataagggtagcgtcaccatggcgcacccggaaggactcactctatcggaggtactaagacagaggaaagaatgagacaagacttcttgtagacgcagagtaaatgtgctatactctgacctgtgtgtttgtctacgaggagggtagctatgttctacaccgaggaagaagtatctgtgatcacaggcctgctcaacgcctatttggtgcgggaacacgccagtgaaaaggtcagggaatcgtatacacggatcagcgaaggacttaaaagccatgcgctgacgagggacgattacgtttggctggagaatgcgctgttgtttctccgcccatattggtggagcgaccgcgaggatggacggatgctgatggatgccctcctgcatacgcagacactggcgcggagaacgtaataaaaattgatgaagggtgtatcgctcgatacacccttcatttttcattgttcttcttcgcggcgttggcggcggcgcgggccttgtcgcggttcttacgttgagcgacgagatcggccttggcctgccgtttcgcttttcgttcctgcaagagctgcacctcctgccgctggtactcctgctcgtagcggggatagtgatgctcccgcggcggcttgtactgcgaaggcagctctgcggccttcagcgccgcagaccagttgccgaagcgctgggcaatgtacgcaccacccacgatctcacagggcgctggcgtataggatgcatcgacacattgccgcacataggcgatgaggtcggcgtcgctggcggtttcatattctatcgcaaaagcctcgtcctgcgcttgcagggcctcgatggtgcgtttgacgatctgctggtgcagtaggttatccccgttgacctgtggcatttttatgtccctcctgggcataataaactcagccagatggagcgacatccttcgtaaatcagcatcattcaggaaagcatttttcgccaccggctatggtaaaacgatagcatttgcggggcgggaagtcaagtatggcatcggtgtcagggcgaaaacagtcgctggagaccgaaacgggaggtatatccgccgagcctttccgcgatgatggatgataaaaagggtgttcgccgtcaaaaatcgcgtcaggaggagtacgaaatggcacgcagaggggagaacatctataagcgcggagatggccgctgggagggccgctatatccgaggtcggacgccggagggacgggcgcagtacggctacgtctatgccgccacttacagcgcttgccgggaaaagcggcgacagtgcctgcgggagctgccccgcgagatcacgcccagcaataacatgacactgccggaagccgtgggtctgtttttcgcggagcgagagcgaaaactgaaggagtccactgtcagccggtatcggtatgtggtgcggcagtatatccagccgcagttgggagcagcgccgctatacacactgacggagcagcgggtagcggatttttaccggaagctccaggaacagggtctatcggccaaaagcacacgggacgttggcgtattgctgcgggccattctgcggaaggcgtccaagcacggatgcttctgcacgggcctgaacgcagaactgccggtatacaagaagcggcaggtggagatattcaccgagccggagatcgtacagctggcacatcatatcatggacgagccgaatctgaccggccttggtgttctgttgacgctgaacagcggccttcgtctgggagagctgtgtgcgctgcgttggtcggacatcgacctccatgcgggctttctgcgggtggagcgggaggtacagcggatctatgtgaaaggctgcacaagactcattgtgcagccgcccaagagcgaatcgtcgctgcggagaataccgctgccaactgatatcctgtccctgctggcagcgcacagacccgagaacgcgggcagcgtctgtctgctgacaggcttcagcgatgcgttggaaccgcgtactatgcagaaccgatataggtcgctgttgaaacgggcgggcgtcccgtatcgaaattttcatgccctgcggcacacctacgccacacgctgcatcgagcagtacgtggatgtcaagagcgtcagcgaaatgctgggccacagcgacgtgcggatcacgctgcaaacctatgtccatgtctccctgcggcataagcagcaggcggtgcagagcatctgcttcctgcccatctgcggaaacgcagaccttgcgccgtcagaaatcccgtcaggcgcagcaaaagccgccgcacgacatggcgcggcggcgcaggtttcctaaatgatgctgatttacgaaaaagttacgccgtccgcgcaacagaatacccaaaaaacggcagatgtgcaatccgcgcacctgccgcttttcgatcgcgtgacaaatttcatacgctgtgctatactacccacatcaccaccaaggaggacgtaccatgcgtatcaactggttcaaggacgaaaatcacctggtctatatcaacggcgcgacacagctggcagagctggaacggacgctgcacttccccggactggaggaagcggccaacgagctgcggcagcaccccacagcggagggctttaccatcaaggggcccaagcgcaccagcgggcggctgtttgtgcccgacctgacctttggggagcacatcgagatgggcgaaaacatcttcttctatatgggtgagatgcaggagtgctacgtcatctactggccggacgcaccggtggcaaagtgaggcggcatcgcgcatgactttcctgcaaaagcatcacgggcagatgtccgattccatgctgacagcctttttcatcatcctatccggaggattgcaggacgcctatacctattgctgccggggcaaggtgttcgccaacgcccagaccggcaatatcgtgctgctgagtacgcatctattcgagggagactggggacaggcgctgcgatacttagtccccgtgctggcgttcctgctgggtatctacatcgcggagtgcgttcaccggcacttcaagcggatggagaaggtacactggcggcagcttatcattctggcggagatcgtgctgctggcggcggtgggcttcctgccggagacgctgaacaccaccgccaacgccgtggtgtccttcgtgtgcgccatgcaggtgcagaccttccgcaaggtgcggggtcacgcctacgccagcaccatgtgtatcggcaatatgcgcagcggtacggaggcgctgtgcgcctacttccatacgggggataaggaaatactccgcaaggcactgacgtatttcggcgtggtgctgctgttcgcgctgggcgcgggtatcggcagcatagccacgctccattggggcgcggggacgatctggctgtcctgcgggctgctgaccgtcagttttctcatcatgttcgtccacgacgaggaacagaagctgaacgaataaaaacaacaccggcggcgttacccacacgctgccggtgctattttgaggtaaatcctcatggaaaagaaaaagtatggttggctgaaccatggccttatcatagcaggtcgaaaaagatttgtgaagcgcatctttgttcttgaaaacatgaggacttgtatagtataatgcacctcgaaacgaggtgcgtcatgagtatttccaaatatcaggtctttctgaaaactgtttcttgcggcagcttctccaaggcggcggaggccatgaacttcacccagtccggcatcagccacgccatcaactcgctggaaaacgagctgggcgtgaagctgttgagccgcaaccgcggcggcgtggtgctgacggcggacggacgggcagtgctgcccaagatcgaaaagctgtgcgccgcccaccactccctgatgcagacggtggaggggctgaaggacatggacagcggcttggtgaagatcgccaccttctccagcgtatctgcccagtggctgccccgcatcctcaagagcttcggcaaggtataccctaatatcgaatttgaagtcgtcaccggcgacttctacgaccagatcgagggctggatcgtcagcggcgcggtggactgcggctttctacgcctgccgtcggtgaagcgcttgcagacctacgccctgcatcgggacgaattgcaggtcatcgtcccctgtgaccatccctacgccgaccgtgacccgttccccgtgtctgcgctggcagaggaacccttcatccagctggaggagggcgacgactacgagatcatggcggcgtttgacgagatgggcatccgccccaacgtgaagtacatcgcccgggaggatcggaccatcctcgccatggtgtcggaggggttgggcatcagcctgctgccggagctcatggtgcgccacagccccacgcccatcaaggtctgtcatgcgcccctgcacttctaccgcaccatcggcatcggtgtcaaggacaagaaggcactttccaactccacccgtctgttcgtggactatgtacggacgtgggtggcggaaaacgggaatacataaacgttcaactttcgctaaaaaagcatgagaacacgtcatgtaatacagacaagaacgcagttcccatacggcttcgcgggaacgaacaaacgacgccgcaaaaatgtatccttccgcgaaacaaatcccctcttgcaaaacgacggggtcttcatcataatagcacccgtagcccccgaaaagtgaataggcttaccggtctgaaacgctgcggcgtttcggtgaaagttggaatgtgggtcaaagtccccgcgaacaggtcactgtgaggctcctctgaggcaggagataagtcaggtcgcgccggtaagcgtcacaatgcacacgcctgaaaccgagctgcatgaacgggggcttcgcgcccgtttacacgagagaagcgtcggcatttgccggcgctttttgcatgaagtcagggcacctatgggggacggaaaggtgcttgaaaaaatgggagaacgcaggaaatacgtccgcagggacgccacggtggaacggttgtccgctatctttttagaggatatggttgggagcgtaaagccatccacgctggcgtgctaccgccgcaacatccaatgccacatcctgccggcgctgggcgagcgcgtggcggcggaactgacggcggcggagatcaacgactacatccagcagttacaggaggactattcgcccaagctggtgcgagaaatcggtggccttctgctgcggatcgtaggtatggccggtgtgggctacggcgaggatgtgacgctgccgaaggtgcggcagaaggccgtggaggtgttcaccgagccggaactgaagcagatgggacaggtcattctgcgccgcccagacaggacgggacttggcgtgctgctgacagcctacaccgggttgcggctgggagagctgtgcggcctgcaatggcaggacgtggacgtcggcgcgggactgctgcacatccagcggacggtggagcgcatcgcgcagataggcggcgggacgtgcctgacagtgcagccaccgaaaacggagaactccgaacgctggatacccattccgaaagagatgctgcggatgctgaagccagagacaaagcagccggacagctacctgctgaccggcggggagatcgtccctgacccgcgggcgatgcaataccgctataaggtgttgttggagcgctgcggtgtgcggtatcggaatttccattgcctgcggcacagctacgccacgcggtgtgtggagcgcggggtggacgtgaaaagcgtcagcgaactgctgggccacgccgatgtccgcaccacgcttcggctatacgtccactcgtccatggactacaagcgcagagccgtggaggggattggttttctcaagggaataacgtaaaaaaggacgccgaaaggcgtcctttatccaaaaaatggcacaaaaattttcgcaaagtaacatactttgcgaaaaagcgcggaacgccttgcgctgcaaggcattccagatttacgccagaaaaaagtcgaaaattagaactcgttgttgacacggaaaaacggctggtatatactgttattcggttgaaattggaaaattttcgcaaagtatgttactttgcgaaaaaatcgaggccaaaaactgaataaaaggtcttgcgaagtcgtgtggctgtcactgtaaagacggtatatcattaccgtcaggcggcagttttgaaggaacggggtgataccccctgcggacggcgctgttgacgtaaggaatggaccaaagcggcagaaatgccgtgtggcgaatagcagccattggagcgaacgctctgagaaggtaggttcaggtacgagaagggcaaaagcccttcgtgacgttagggcagaagaattgcacgatggaggatcagtgttggacagcgggcgatctctccctgacggcataggcgggagtgcgcgctggcgagattcgtcagcgcattttcatttctgccagatcaccgctggttttctttggaaaaccggcgtttttttgtaagggaggatcacgtctatgtccaacaggaatccccgcgagagatttgactacaagagttggtttgagcgtaatgtggccaagcgtaccgtggcggcgttggaagcgcgggacgcggagtttgccgaaaagcacgcggatacgccgctggcgcatttggcgcaatacgtcggcaatcgtgctgaactgctgcggcacacgcccagtccctgcgagatagacggcggcacgtttatcgaggagcgcttcggcggttgggccgcagtattggagatggcacgtctgcggccaccggcgaaagagcccaagttgaaagacaccgcacgctacaagcgggaaaaagccgtgcaggagccgctgttctacgaggaatccgagcgcaagaagaaggcgaaacgcgccaaggccgcagccagtcatgcggcgcagcaatcacggctgaaagagaaaaagcggctggagcaggaaaagaaagaggctcgtgatgccgctgcccgccagcgcgaaattgagaaagcggcagaagccgccgagcaggaggtgtcctgctgagttacccttgtcaagccatgacggtctgaacggagactgtcagctttccataagggtgggaggggaaaagccgcccctcccacctcctctctttgttgaacggcaagaccaaaaccacatacaaaagcaaatatgttacccgcccctgcggggcaggtaacgggaaaaatacgccccatctgcggggcgagaaacaggaataggagcaaacacacatgatctctttgagtgaaatactgcataccatcgcccaggcgctgatgatcccctgcctcattatactgataattctgatggccggggcggtctggcagatcggcgacatcgtggttgagtacatcgcggaacgccgcaagcataagtgtaacgtcccccagctgctgcgcgacgtacacgcggcgggcgcggacggccttgcggagctgattgaaaacagcggcctgctgcggcggcagaagaaggccctgctggagctggcggagagccgggggctgcccaaggacaccctgacggcgctggcggaacgtctgctcgccacggaggaggcgcggaacgcccgcaccacctccatcacggacatgatcgccaagctgggccccatgttcggcctgctgggcacgctgatacccctgggccccggcatcgtggcgctgggacagggcgacacggtgacgctgtcggagtccatgaacgtggcattcgacaccaccatcgccggtgtgatcgcggcggcggtggccagcgtcatctcccacatccgcaagcggtggtacaacgacgacatggtgtcgctggaaacgctgatggaggcagttttggaggaggtcacgagcgatgttgaagggtaagttttcctcccgccgccgggtgacggaggaggtggacgccatgtccgggctggcgaacctgtcggacgtgatgctggtgttcgcctgcgggctgatggcggcggtcatactgaactggaacgtggatctcagcaagacgcgggtggagatcctgcagcgggagcagatgaaggagctggacaacgccgaagagctggagcaggatatccagtcctccagcagcttcgagcagaagggtacggtgtacgaggacccggagaccggcaagctgtatgtggtgatgccgaagggcagtaactaaatagtttttacatagatacgttcaacagagagaggagcaaatcacatgaagaaacggacaagcaatgtgtctcggcgcatcgtgagcctgctgatgagcctggtgctcacgctgacgctggtgacccccgcggcctttgccacggaggtggtgggcggcagcggtacggccatcatcgagggcaacgcgaacccggctgatcccgcccccggcgaggacagcgagaacaatgaggacaagaacaccgaggacggcaaggacgaacagcccaccaaccccggtgacgaggataaagaacccagcgaagatgacgagataattgcagacgaagaagatgcagacgacggcgacatctatgatgtccaggaggatactctgctgggcatatctctgtatgctgctgcaaattcgtgggacggtgcgtccatagcggcggttgaacccaacgctgagggaatctatgagatcagcaccggtgcggagttggcatggctggcagcacaggtaaacaacaagaatgtcttttctggaaagactgtaatgttgacggcagacatcgatcttggtgagcaggagtggacgccgatcggcaagaacttcaggaagaatggcaagagttttcagggtacatttgatggcaatggccacattgtaaccggcctgcagatcagcagtggcaacgccgaaaatgtggggttgtttgggccgatatctaaagcgatcgtcaaaaatctcatcgtagaaggcaatgttaatatgccgaatggatccacaattggcggtatcgtggcaaacaacagtggcggtacagttcagaactgtggcttttacggtgtagtcgagggttggagaagtgttggcggtgtggtcggcagcggcaatgccgttaactgctggtattactataccggcatggacgaggggtatagccggagcgtgtgcggcggtacggccacagactgctacacgaacgtgaacgcagagcagactggcgtcacagtggtaacaacggagcagttcaaaggcgctgcggtagtcggcgagactggcaagacggtggtggagttgctgaacgacgcattgccgactgactgcatgaactgggcacaaggtacggactatcctgtgcttgctaccggcggcacggagcagaaagataaaactataagtttgattccgcttttccccgactgcgagtttgtcgcatctgttgaaggagaagatgtcacttatgatgcggagaacaatatctacaccatcggtgcagatacgtcagtggtaaaactgatgcgctctgatggcaagactgagctttgggtgaccacaaaggaagacggaacggaagcgagtcctgtaagtcccagtgaagatttcactatctccggcacgaagactacgctgtattacggtacgaaggacgattttgataccattgccgcgtggaacagcgcgcttggacgtagcggaaatactgcgacggtcgccacggctgaccagctgaaggcgctggcccgcatggtcaacagcggcaaggatgagatgacgggcaagaccatctcactcgatgcagatattggcctcaacagcgaactgtggacgcccatcggtaagacagatcattcgttcaagggaacattcaacggcagaaatggtagtacttactacacgatttccggcctgaatggtgacctgtttggcatggtaaatggcatcatccagtatgtgaccatcagcggcggcaaaggacggctggtgactacgctgaagtccggcacggtggagaattgtatgtccaccgcagatgtcaccggcgcaggcggcggtttggtgggacagaacagcggcacggtgaatagctgctactactacaatgccaagagcaaaaacacccctgccgtggtcggcagcggcacggtgacgaagtgcttctatttggcagatacttccaccttcggcgcagatatcgacaccggcgcacgtacagcggaggagttccagctgggccgtgtggcgtatgaactggggggatcttcttacgtttgggtgtatgatacgactaaggcagaaaagatgccgcagttgggaaacgcgtccacgtccttgacaatggcggcagcgagtgagctgaagctgactaagccggataatcagcccgaagatgtagtggtcacacttggtagcagcgacaaaaaggtgctgaccgatgtcgctggaaaccaatactactatgctgcaagcggctatattggtggcgtgtctgatgtgccggtcacattcaccgctccgaaggggtatcaaatcgtgtttgctcctgcggcaacacaagtgggaggaaaagactatcttcgtataaccggcagtaatgtggagtatacctattcactggtcaaggccgacattcgctggtatgaaagcgctggggcggaaaaaaactacgttctcaagagtgctgacgaattgatgggtttctgcctgctggccaatggaagtattgatggcgtatccaagaattttaatggatggactctgtcgttgggtaataacattgatctggaaaatagcggatggaagcccattccacgttttgcaggtgcttttgatggcaagggctatgagatcacgggcttaaatgtaaactacacaggtggtgacttcaattcaaagactgcgggaatgtttgaaaaactggtttcgcctggccaaatattgaaccttgccgtatcgggatcagtgcaggcagacggcaagataaattatgtgggcggaattgtcggtacgactgaaagtggaagcgaaatccgtttttgccgcagtaatattgctgttaaagtcgatgcggcaaacagcaccaccaacggcatggcatacggcggtgtgacgggtaaagttcaaggtgcgatttccaactgcttaaatgaaggaacgataaccgtagataacattaagaataagtgttacattggtggcgtagccggacaggtcggcagtgcagcggatctctgctggaataccggcagtgtaaccgcttccagcacggcaaataaaaaaatatataccggcggtattgtcggatacggagctgcaacaaactgctataacaacgggagtgtcactggtgcaaccgataagaatagatatgtgacgggcggcatttcgggcaatggcaacgtgaccaacagctacaacctgggtgacgtgaccggtgcggaaagtggtacctacggcatcagcagccgagctgccaccaacagctactatctctgcaagctgaacggtgcagttgagcagaaatatatcaaggatagcagcagtgaagcgcagaatatcaccgctaccaccgaggacaacaagaccgtgtacaaggtggatggcaccgagctggtggagttgctgaacaagaacagaagcacttacaccgagtggatcaacaagcaggtcgcgccctataaccctgtgcatatcacgcgctgggacggcagctttgaacccggcgtggagggcgtgatcacccttatctatgaccccaacggcggcgaaggagcggctgtaacggagcagcagcgggtcgaaggcgataccggaagcttcaccattaagtccgatacggaattgggcttcaagcacgagaacggcacgttcctcggctggagcacaaagcccaaagcgacgacggctgacagcaactatgctgccggtaaaacggtatcggtgaaaaaaggcgaaaccgtgacgctctatgccgtgtggtcgccgatctgggcaggcagcggcacggaagctgatgcctatcagatctccaacgccgccgacctgactgccctgcaaacgcaggtcaacaaaaacggcttcagctacaccggcaagtggttcaggctgaccaataacatcgatctgaacaacgagccgtggacgcccatcggcgtcgatgcctaccatttcttcggcggcagtctggacggcggcggcaagaccatcagcgggctgaaggtggaaacaaacgggaactgggcaggacttttcggcaacgtgcgaggtacttacggtgtgcccatgacgatgcgggatctgacgctgaaggacggcagcgtgaagttcacaagcagcgggacgtcatgctgcggtggccttgtggcggctgtagagggcgaaactgtgctggagctgcgtaatgtcgttgctgaaaacctgacggtcagcggcggcatatttggctcgggcggccttctgggcagaggacgcgtcgcaatgacaaactgccacaacagggacggttccgtgaccggcagatatgcaggcggactggccggtaagggatacagcaaccgtcaggatcacgttttagcgggttgtaccaacagcgctaaggtagtcggcgaaagaaccgcaggcggaatgactgggaatgaaacatatagcaacggctcctacacgagctgcgccaacagtggaagcatatctgcgacacaggggtacgcctccggcattgcggcgggcggaagctatgagcggtgcagcaacagcggcgctgtgaccggcaagcaggctgcgggtatctgcgtcaatggcatcaaggcaatgtactgcagcaatacaggcgcgattaccggcacggactatgcggcgggtatccttaccaacggcggctacggcggcacagtagaattctgctggaacaccggaaaggtcgaggcgagcacgcccgtcaaggcctttggtatcctctacggctggggttcgtataatagggtcagaaattccttcagctatgtcccgggtgccaatatcggccttgcgcccaccgagctgaaagaggaaaatgtgtccgacagctactatctggcggacaagaaggactccgtttccagcgccggtgagtgggccagcgcagacgacttcgccagcggcaaggtagcctggggcgtggacggcagcactggtgcacacgctaactactggacgcagggcgcaaacaactatcctgtccccatcggtgagggaacgtccaccagctactaccgtgccaaggccgagtgcggcacaggcggtgcagtgagcatcaagagcagccgcaacttcactggcgatgcggacaatgcggtctatgggcctaaaggtatgagcgtgaccgtcacggccacgcccaaggacagcagctatgcgctcaagagcctgacgctggatctgatgagcacgggcagcaccacggcgctggaaagtggcgacagcttcacactgggcgaagccaacgcgctggtggtggccgccttcgccagcaccggcagcggcggtaacggcggtggtaatggcggcagcggcggtaacggcgacggcagcggcacagataccggcgacggcgcaggcgatgaggacgatgagggcctgcaagacggcctgaatatggatgtggagtacaacatcaagggcctggtgctggccgcttacgccgagtggggcgctaacggcggcggtaagaccttcgcccagtggctgaaggcttcccccagcgtgctgcgtgcgtttatcaccaacagcctggacaacatggccgcagcggctaagtccaaggataccgacgaggccaagagcctggcagcgctgctgctggccagcttgaacgaacacagtggcctgaacagcaagaacggcgacatcatcggcaaggcgctccagcgctacatggataccggcagcgaggcgaccttcagtacgtggctgaccaccggcagcggtatggccagcggcacagtggaggagatccttgcacagtacaccgacagcctgctgaacttgacggagcgcctgtataccaactgggaaagcagcggcacgtccctgaccttccccgtgtggctggatgcccagcaggtgacgatggagagcctgtccgagaacgcggaagaacctgaggctgagcctgatgacacccagacctccgaagccccggaggatgtgccggacggtcaggaggccgagggcggcgccagcggcggcggcaactccgtgtgggaggtcatcggcacggtggtgcgcgagaatcccatcatcgtctggagcatcgtggccgtggttacagccttggtcatcgtgggcgcggtgcgccgctaccacaaggtcaagcgcgatgagcgtgacgatgtggccagcaagaaataagtgaaatagacggctcttagagggcggtctgccgattcgcgtgggcggaatttccgtccacgcgaatacggctatataaacggaaatgggagggatgcctctgtgagaagaaaagtgcggaattgggcggcgtttctgctggcgctggcgctggtattgggcatgatacccgcagcttacgcggcgggatacagcatcaccgtcaacgccccaacagggaataacctgccctattgggtgtttgagaaagtgggcgtagacagcgcagatgtgctgaacctgacggccaacgaagggcataccctgcccacaaataaggtcgcccgtgtgtcgctggctgtgggcaaaggcaaggacggagaggcctcctgcggcatctctgtcaacggaatgtactatgtgcagtcggtcacattggagcatcccgacttcttcaccggcacggtggagatccaaatcggcagggatgcccaatggagcgaggagacatggggtaatatcacgcctgtggaggattccaacatcctcggccgcgtgcagttcaaggacggcaccttcaccggtgacgtgaccatcagcgtcacgcccatgacgcagcagcaggcggacgcggcggcaaagaccaaccagcgtcaggtggtgcccaaggggaaatacagcgtgtcggacatcaccgaggccatcgacggcatattggcgtggaagcgggcgcagcagggcgtggcggagggtcagccgctactgagcggcgagctgctgacctatgccggcagcaccgccgccgactggctgcccatcgggctgtcccgctacggcgcggaggacgactacgacagctatctggctgcgctgagaacgtatgtggagcagaaataccgcgagccggacaagctggacagaacaaaggcgacggaatggcaccgcatcgcgctggcggtgctggcgtgcggcggcgaccccacccacttcggcagggatgaaaacggcgcggatatcaacctgatcgccgacggcgtgtatgaccggggcaaaacggcggatctgggacggcaggggctgaacggctggctctggggattgattacgctggacagcatgaagtacaccatccccgcaggcgccagctatacccgcacggagctggtaaagaccatcctgtcctatcagctcagcgacgacggctttaacctgcgggtggcgcagggcagcaccgccgatccggacatcacggccatggccatacagtccatggggccgtactaccgcacctccaccctgaatgtgaaggaccctgtggacagagcgctggagcgcctgtcgcagctccagctggacacggcggatttccgcagctggggcacgcggaactccgagtccacctcgcaggtcatcatctccctatgcagcgtgggcatcgacccgcagaacgacccccgctttgtgaagaacggactgaacctgctggacgcgctgttctattaccaacaggaggacggcggctttgcccactcctacgagctggatgagggtaatccctccgccgtacccggggagagcgacagcatggccacggatcaggcgctactggcgctggtgtccgtgtggcggcaggcgcagggcatgagcccgctgtacgacttccgccccggcggcgtatcctccaagatactgacgccggaggagagcgaggtgtccttcgccggcagctatgagtttacgcaggagctgcaaagctgcgtggacgcgctgcccgacgcgttgtccacggaggacgcggaggaggtggccttcctgctggagcggttgaagatgagccgtgaatttgacggctatgacaggtacatggagaagctgacggcggcgcaggagaagattgacgcgctgtgcgcggagatcgagagcctgaacgcggatatcgccgcagagatattgcctatgaccgacgccggcttgaaggaaaagcccatcgtggacggtatcgtgaagcggtaccgcgcgctgtctgaacacgacagggagctggtggagagctgggatgcggtgctggcggtaaaggcgcagacggacgcggcgcagcggacgctgctgctgtgcatcggcggcgcggcagtggtgatgatcggcggcagcatcctcgtccgccgcaggagggagagcaaatgaaacgacaactgacgcggctgctgaccgcgttgctggctgtgatcctgctgctgccggtgacggcgcaggccgtgcctgcatgggacggctggacagcggagctggaggcggcgtaccaaacggtgtccggactggtggcggactccgtcagcgagagcagggactacctatccgccgcacggcaggaaaccaacaccaaggcggtgtacgcgctgtgggtctccggcgccgacgtgccggagggcttctacaacgagtatttgcaggcgctggcagactggttggcgctggcggagcagcggggcaggtacgcctatatccccggcgcgctccgcacggtggcggccatggggctggacgtgacggatctcgccggtcacgacctgctggagccgctgcggcggccggagatggtggaggcggacgaggacaggctggatatgctgctggacctggacgccgcaggtgatgcgggtaagacggacgagttcagcgtgctgcgggagcagcttctgaccgaggcgctggcccggcagcaggacagtggtgaatttcgctatacctcccaatggcctgccgagctgaagcaaaagggcgtggctgctgagccggatcggttcgactacatcctgctgacggcaaagtccgcgcaggcgctggcgccttaccagagccgtccggaggtcaaagccgccatagaaaaggcggtaagctatctctcgatgcagcagctggacagcggcggcttcctcagatttggcgaggaggacgtggaggaggatgccgccgtgctggaaatgctggccgcgctgggcatctccctcacggacgagcgctttaccaaggacggccacaccgtgctggacggcatgatggggtggtatcaggaaagctattttgacggtgcccccgcgccgggacaggggttctaccgacatgatattctttgggggtaccgcggatcaggggatgcttggtacgcctccagctcatcgttgatgtccgatccggatgccccggatgaccgcggcaaggctgtggaacggcgaacctacataaacgaagcgggacttatagggctttgtagtgtcagaccggcagtggctgtggcgggaacaccgtccgcaagcacgccggaaaagggaaaccgtcaagacaatgccatagattacagtgaacttttacaggcgcagtctgcggattatgcacagaagctggcagaggggtattacggggatggaaacagcacgatcgtttccgagggtgctctaagccatttggccaaggagatcttatccatgtccgaagtcggcggcggtaagctgccggaggagcaacgtgcacagctggaaagccttgttgagatgctgtcgggagccagcggcgaatatctgatgggacgcaaggcgaacacctactcgccggttctggtgcaggccatgaaagcgctggatatggatcctgcagacgtaaacggcatggactttttggcaccgttgacaaatctctctgccatggacactgcggaatacagagaggcgctgatggattttgactcggtagatgcgtctatgtggcgtaagcgcggcgtggacgcggatacggtcgtggacaagtacgccgccggtatactgcaatatcagacggcagacgggcaatttgacccttacgcaagctatagcgggatagttaccccgatactccgggattatgtgcagtacactgccgagaatgtcaccgcccttgctccccacgcggacaaggagtacatttccaaggcgatagaccgtgccattgaatacctgtcctccgtacagctttcggatggcagctttccgggtatgaccggtacttcaaacggcgaggcaacgctcgccgtgctggaaatgatggaagcgctgggaatatctctggacgaccctcgcttcgtgaaaaacggaaataccgcggcggacgccatgaagaccttttatgtagacggagtgggctttctttccagcttcgaggtggaagcgccgctggatgatttgggcagcctgccggtctacgccgatccggtcatggatgcttctgctgccgtttccgccctgacctacctccaagccgccgaggacggcacattcggccccgacggcaagggcagcagcgtgttcgaggtggtgggcgccgccctgacggaaacgccgctgggcgcgatcttgctggcggttatcgtagtggccatactggcgtttgccatggtgcgccgctaccgccgcatcaagagggagcagtgacatgggtacgaagcacagatgcgcagcggcattgctgctggcggtattcctgctcttctgtaccgcctgcggcgctgctcctgtgcagccggaggatacagaaaacaaggatcagtacatgaccgaccctgtgccggagggcaaacctacgccggtagagccgcaagatacgacggtggataccactacgacccacacctgtactttctccatctcttgcgagaccattctggacaacatggacaagtgcgtggagaacaagaagttcctcgtgccggaggacggcattgtttttcccgccacggaggtggagttcagcgagggcgagagcgtattcgatgttctccagcgggtatgtcgggacaacgccatccacatggaatccaactggactccggtatataacagcgcctatgtagaggggatcaataacctctatgagttcgacgtgggcagtttgtccggctggatgtacaacgtcaacggctggtatcccaactacggctgctcccgctaccaggtgaaggacggcgacgtcgtggagtggcgctatacctgtgaccttggctatgatctcggcagtggtatgggaggataatggaggcgccagaatatagagaacgctgatataggaagcggagttcccggaacacattggcctctggagatattcgagaggccgcctaaccatgcgaccagacaacacaacaaaacggaggaaaagccaaggatggccctttgcggccatccttggctttttctccgcttttcattatgcggatgccaatttcattgccgtgccccaccgtttctgccgtttgcgagttcttcacaaatgacgaaacggagggaataaaatgcattttgaccgaatggcatacggggagcgaatcaaacggttacgcaccggcagagagctcactcaagaacagcttgctgaaaagataaatgttagtagaacctacatagttaaaattgagaacggcttacagataggcccgattgaaattgccattgaactggcaatgttcttcgatgtctccatggattttctcttgcttggaaaagaaaactatcgcgtggacagaaagcagtgtttgagaatggcaatcgatatcctctctgaattgcaagcggaactgtaaaatgttccattttgggtatgcaatgttccaaactgtttctgttccgtggctttccttcaaggtacaatttactcaagccaaacaaagggcctattgtaccttgaaaaacgccattcggccatattcggcaactggatcacatcagcagatgagcctccgtaagaaagaggacagcgatgcggagaacgcgccatgaccacctgcacgggagtctcccgtgtcaatgcaggtcccagatcggaaggtgcccagcgatacccgttcatccaaaagcagccgcggcaggctgtctcgccatgacctcatctgcctacaatggtacttctgcatagcgacagatacaagcaatcggtgcagctcggagagatcctcggaggggtgcaattcccatgtgcggcgcccaccgcagaccagttgaccgcccatcagtccgggaagtagtgtcgaataggactggacaaacgacagaaacggcgtgggccgttccgggaaaccggggcggccccgccatgacctttgcctgatggcagaaatgcgggtgctgcactttccctccccctcacatatttactacctacccccccaattactcctttccgcagcacccgtgtttgtgccatcaggaatcaatgcaactgcaagaggaggggtactcattaaaatttctgaaagctcttataccattggcgatgacggacgccttgtgatcccggcggatgacttgactgaaatggggttgactgcggggcaggacgtgtttgtggcttatatcaccgacgatgacctcgcaaaccgataccatgagttcacagtttcatcggtatctctttctgaattggataccacccagcagatcgccataccgcagcaactattggggcaagcaggcatcgactcgaacgcggaggtgcagatcgcctgcattgacggagctatcatcattacgggggatacacccctgaccgaagatgaattgagcgaggtcgttggccgtctgcgggcggtcaatgacctcgccgaacatttcgcaaatgaatcggatactgaagaaagggggacaagctatggcagcttctaaaaacatgatagcgctggagataaatggactccatgtgcatcttacctttacaccatttcctgcggatgataccgtggccgccgtccgagcaattttgaagaacagctacgttcggacgctccagacgtaaggaggcgtgaccttggctaaaagagtttgctgcctgtatcgcgtttccacgctgaagcaggtcgaaaaggatgacatccccatgcaaaagcagcgatgccatgagttcgccgcacaaatgggttgggacattgttcgagagttttccgagaaaggcgtgtccggcttcaaggtctccgccaagcagcgcgacgccatacaggaaatccagcgcgaggcggcactgaacacctttgacatccttcttgttttcatgtttgaccgccttggccggcgcgatgacgaaacacccttcattgtggaatggttcgtcaacaacggcatcgaggtttggagcgccgaggaaggccagcagcggtttgataaccatgtggacaagctgctgaactacatccgttactggcaggcgtccggcgaaagcatcaagacctccattcgtaccaagacccgtttggggcagatcgttatggagggcagatttcgtggcggttacgcgccctatggctatcagttggtaaagaaggggcgcataggcaagaagaaccgtgagctgtttgatattgaggtcaaccccatggaagccgcggctgtgcgccgcattttcgatttggccgaccagtacggctacggtggccgaaaaacctccactacgctcaaagaggagggctttctcaacctccgcacgggtgagccattccattactccaccatccagaacattctcatcaatattgcttacaccggtgtactccgaagcggtgagagtatctctgagatatttccggacttgcagattatcacgccggagcaattccagcgtgtgcagaagggccggaagcagcggtctgcggactaccttgcaaaatgcgctgcggcctatggaacggaaaccatcacgctgaaggatggcagcgaagcagaggtttcccgcccgtttcgcagttatccccgaaaaaataccggcagtgctctgctgtccggcaatgtgtattgcggtcactgtggtggccgcatttttgcgtcaacagcgcgaaaaacccatcaccccaccgatggcagtaatgggcgtgtggccatctacaagtgttataaccgtacccagcacaaaggaaactgcgatggccctactacctaccgtgccgaaaaggtggatgccgtggtcagcaagattatccgggatatttttcagaaggccggcactgtcagcgagtacgacatcgttcataatcagatcggcgcaacggcatctgatctgcagcagcagattcggcaagccaagctggagctttccaagaagcacatcgagcagggccgctgggaaggcctgatgctggactcgctggatggcaagtgcccgttcacccccgagcaggtcaaaagccgactggactccgtaaaggaggccatgacatcgctatccgccaatattgaatcgttggaagcccgattggccgacagcgacaggctcacccaggagctgaaggatcagcaccagcagcttctgtcctgggctgagatgttcgataccgcctccccccgcagagcgcaagctcatcgcctcccatctcatcaaagccgtgaccctgacccgcggctacggcattcagatcgacttcaacatctccgaggcgcagtatttgaatgggatggagctgtaagagataaaatggcgaggcaattttaatgctaaatttcgcaaggaaaggcagatgcaatagcagattttataacatttcctataagagcatgtttttaatggcacaacgcatggggttcacaagtcacaatccggctttgccataatggagacgccggattgttccctcgacacaaaaaatcatgtcagcattatttgttaaacacccacaccccaaactgtccgaataacgaataggatggcgcgaggaataccaagcaaaaggctggcaggaaaaacacacgcgtgtgttaaaaacgcacgcgtgtgtttttctgccgctatttcatgtgatacctagctcctgcgccttttccttccagcgacagtcttcctgcgtctttaagcttttgcagaatcctatatgcttggggaggtgtcacatgcagaagttcaaccacatctgcacgagtaacttcctccttagcttgagccagctgcatcaccaattcctgatgccggagcgcatctatatctcgatttcgcacatatccaacggtactgtttgtttctttggagtacctcgagctcataatatagtatcgtccgcggccattgcccaagcgctctactaatcctgactccacaaggttttcaagaacgacacgcacccggctctcatcggtgtgggttctttctgacacatcctgtaccgaggcacgatgcaattgttttatcgcatccagtacaagcagtagatggatcggcagcgaccgtcccaagcgttgctgttcttcggaaaccatacaaatgaatgctttatcggtcggcccctttgggatgaacagtttcacattagattgtgtggaattcgagtagtccggaagcaatcgaccatacaacaaggaaccttcaaaaatgcggtcaattcctcttcctgtacgttcggccaggccgatatgcttcattgcatcagccaaagccggatttcttccatgagggtccgcatccagtaaattatcgactcggatgccttcaataaatcccccagggttactgatggtcatcccttcatcatttatttgaactagaacgcgaccaagaacagaatagtctctgtgacagaatgcgttaactagcgcttcacggaaggctctaggatcgtagtcaggaatcgtgatgcggaacagtccctgttccatttcctcgctgtgattccatgcagaaaaagcatccgatatcttttcaaaagccgcaagaatgggaagatagaaggactcgttcgctttaatatctgtgcccacaagaacttgtatggatgcttctgctgttggcatatggcgttttagtgcttcttttctgccaattagtaacataccacaaaatgtgggaacaatcgccccgtcttgaattgtaaccaactgcaatgccttgtccaactcctcatcattcagttccagcagcgctacttctccgcgataggaacgaatgatattccgcaaccgttcacgttccacaggatcaaggtcctgataggtagcatcaggaacaggctgtgcggaataatcaagcaaactcaaagatgaaagccgggcagttatttcgtacggatacatgggtacattttcgggttcgccgttcggcttaagcctgcggcgttgaatcttaccatcagaggtagctaccacactgggtcgcttgggaacagaaatcctcaacactgggagatcgaattctaaaatttccgatcgaacagaaactggaggaactgttcggttggcgataaacgccgcaagctgcgtgatgtccttatgcctgttgtgcaatccggtaatttgtccatcgttttcaacgcctaaatacaaatcgccgccatcggtgttggcaaaggcaacaaccgcatcaatgatgtcactatccggcaaacaagttctgtcacttttaaactcattcacgaggttttctttaaaaccaatattggacacaaactcacctccaatgcagccattataacacgtgcgtgtgtttaacgcaacaaaaacgcacgaatccctctgtaacatcgaatcattggaagctcggttggctgacagcgacaggcttatacaggaactgaaggatcagcaccagcagctcctgtcttgggccgagatgttcgataccgcatctccgcagagcgtaagctcatagcctcccatctcatcaagaccgttacactgactcgcggctacggcatctaaatcgacttcaacatccccgagacacaggatctgaatgggatggaactatagataagtttacatctgtgctagtaagtattttatacaagtgtttctcataacaaaaacgcaaaaagaatttgcaaaatgcgaccatatactgtataatattacccgtatttcaaattgaaaggggcaataataatgagccagtattgtacattaagccgggtacagtttggaaaactcgatgcgaattctgaatatcttttgcttggcaaagacgcttacaaagcctttttttatgcttgccctgggtttaatattgacgggtttctcaacggtgattgctactatattcacggcgaaaaggggagcgggaaaacagcccttttgaagtatatcgaaataatcgcagaagaaaatcaacatcgcgttgattatatcagattcaaaaaggatatagatgaagatgagcgtaatgcaataaaacgggctggcattccagcggagccatttgaaactatagtggaaagcgagattccgtctgactttacaatcaattgtgtagccgcttggcaggtatttatgattcgtagtgtgttggatttgctacgtgaagataccgcaatttttgaaaatacacccacacttaaaaagttgcggctacttttggacacggcatacggtgtacaaaggtctaccataaagagaatagtccctgcgatgaaacgaggtaatattaaacttgatgtaggtgttgccgagttaaatgcagagttcgaatggagcggaaaagatggggatatggtgtctttccgcgcatttgcaaaaaaagtacaagaactatttgagggactaaaggttgtacaggggtgttcaaaaaagtgttacatcctttttgatgagttggaactgatttatttaaaaaagaaaacgtacgaacgcgatgtcgcgctaatcagagatttgattcaagctattgcctatttgaatgagtccacccgtactcttggctttccgatacatattattgcatgcattcggaatgaagtttatagaagtgccgcagcaaatggatttgaattgaacaagttaatgcaggattttggcgtggaaatttcttggcatcaaaatgggggaaatattcaagatcatccactgatccaaatgctagaaaatcgcttggtatctagccaatctcaagatattcaagacgatgtacaacaaaccggctcaattttgcgagcctatttccctgataatgttgatattgactatcctaggcagacggcattaaactatatcatagatcaaacctgggggaaaccccgtgatattgtgcgcctatttaatttgattaaaagtagatacggggaacggacacaaatcaaaaaagcattatttgaaagtgtgagaaaacaatactcaactgaatcttgggaagaatttagcaatgaattgacggcaaagtattcgcagacagaagtcgaggcaattaggcaagtactggtcgggagttctgctgaattctcgttgattcagttttgcgagagaatagaagaaaaggccaagtttttccctgaagtcaaggccctatcggaaaaacatgttccggcaactatattgcaagatttataccgaataggggtgattggcacaaattcaaaatggaagcgtttttactttaaaggcgatccagactttgatcctacggcagaatgcgtaattcattatcccctccgccggtttttctctgttaactaaagattaccgtagaaatatcggttactaaaaaatacaaataatgtgcggttgtccattgcatctatgacgagtcaagataattgacacttgtattttcttgaataaagtaagcggtatgtgtcgaaattagaatgcaacattttctggctaaactgacactgaatttaataaaattgcgcaaaaattcaacgaatcaaatgcgcgtggatgcaatatgtcagccttgggagagcgttcggttcgcatccgagaggtcgagggttcgaatcccttcaggtccaccaaaatgaaaaccgtccgaaagggcggttttcattttgccgtgggcctgcgggagtcgaagtttatccccccttgcgggggaaatcccttcaggtccaccaaataggtattggacgaacacttatttcttcagcggcggcttcgccgtgaagtgttcgctctgatccaaaacagaaaagcgccgtcttgggagaaatcccaaggcggcgctttttctatttttcttggtttggtatatttcctgtcttatgcgatatactaattgccccgccgtggaggactacaacgattttgcgaaggccgtagaaggtatctggcagcaggacggtgcgctcctgacctacgccgccgtgctggaggcggagcggccggatacgctgcgcggagcctgtgaactcctgcgaaatctggacaactaccagcgcatcgtggaaggagcctacggttacggtcagcagcgattgcaggagacgctggggctggatgatgaagccatctacgagatggagggctacatggattttgagaaatacggtcaggattgcatggaaaacgactgtgtgacaaaaacagagttcggcctgctgcgtcgcttggacccgcccttcccggagcagacgcaggggcagaggatgatgtaagcaaaagcggctcaatccatttggaacgagccgcttaataagcagataaactggaattttcaaattagtctttgcaaataacctttgaatcttcaccatcaattacaattccctgacggttgttaattgggcatagattcaaatccgaaaactcagtcattattttctcggtaactttcttaaatggtgctgtaagataatgcggaagaacatagaaatcaatcaaatcaatccctgcatcatcttcttgtgagtagtcctccggcttttcatccatttgctcgatatattggatgcttggagcgcatataattgcgcctgccgactcgccgatcatcaattttccatttgccaattcctttttcagcagtccatcagttcccgttttacggagctggtccataagaaagaaagaatttccgccggtaaaatatatcacatctgcttcttcaaaaacagactgtatcgttgaataagcctccgttgaaatatcaatttcagttacgatcgctcccaactttttgaataattttcgagccgagccgacataaccggtgtagccttcacgcagtgaagctgttggaataaatgcgactttcttattttcaatttcttcctttatcagacttcctacacttgaaaagtgcgaacataaaaataatttcatcaatattctcctttataaattccgatttgtcagccacatcatagcatatcccccagtaatgtgtaaagccaaattccacaccgaaaggagtcttaaccttgaaagatgcaacacaacttcatatccgacctgcccgcccggaggaggcgggcttattttataccccgcaccccgaagaagataaacggctgggtaccgttggccatgtccggatggacttcgggcgcagcggaaacgagttctggcatacctggtggccccgcggcccggaggagctgaacagccccgcgttcaaggcagagctgcaggaggtcgtggacacgctgcgggagagtgtgctgaaaaaccgcttcgccatggagcgtttctgctatgaacacggcgggaaaatcagcggcggctggacacagaactacggctacatcgtggaaaccgagcattaccgctactgcctcactgtgcgtcctgttgcgctttgccccgcgctgtggtatactgcacatatctatccccacatcgccttcataaaggaggactgcctgtgtctacaatgttggagcgccgctaccggcggcagcacctgaactgtgtgcggcacatcaccctggaccccaagggccggggcgtggtgcgtatccacatgatcccaccccgtgaggacgcggagaacgcgccctttctgctgctgctcaacggcagcaagctggtgcccctgaacctgagctgggccatcctgctctcctgcttcatggaccggctggagcccttcgccgggctggagatcaccgagagcgactggaacgccatggccgccggtgcggtggcccggacccataaggtctaccccttcacgcccaaggagcgtctggcggaggacctgcaaatcatgatagagtccctggtggccatcgcccgggggcaggagccggaggcggaggtcgcgccgctgacgctgggcgagtacgcccccgagatgaccgcgccccaccgtatggacctgatggtcagcgccatgacccgtgacggcgcgtggcactgcaaccagaaatgtctgcactgctatgcggcgggacagcccctgtccgatatgccggagctgaccaccgcccagtggaaagagattttgacgaaactgcgcgcggccaatatcccccaggtgacgttcaccggcggcgagcccaccctgcgcgccgatctggtggagctggtggacgccgcccagtggttcgtcacccggctgaacaccaacggccgcctgctgacgcccatgctgtgccaaaagctgtatgacgccagcctggacagtgtgcaggtgacgctctacagccatgataaggacattcacaacgccctggtgggtgccgacggctttgatgacaccgtggcgggcatccgtgccgctgtggcggcggggctgtccgtgtccgtgaacacgcccctgtgcagcctgaataccgcctatgacgagacgctgcgcttcgtccacggtctgggcgtccgctatgtgacctgctccgggctgatcccctccggcggcgcggtgggcgatgagagccgggccacggcgctgaccgagcagcagctcaccgacgtactgacaaaggccgtggcggtgacggaggagctggaaatggaactggacttcaccagccccggctggctgaaggaggagacgctgcgcgccctgggcctgaccctggtgcccagctgcggcgcctgcctcagcaacatggccatcgccccggacggcggcgtgatcccctgccagagctggctcagcagccaacccttgggtaatatcctcgccgacgactgggacaagatctggcagagtgagcgctgcgcggccatccgggccaagagcgccaaaatggagcagctgtgccaactgcgtgaaagcaaccgggaggagggcaccctatgctgaagaaactgcacgttctgctgcttgtcttactggcggcggtttgctttaccgccaccgcatgggcagattacgactacatcgagcagtacggcgttatggtgacgcccaacacggcggacgggagcttgctcatcaccgtgaagctggagtggacgccgctggaggagctgccctacgggcaggagctgaaaataggcgtgcccaacggctccatccgggacgtggcggcactgacggacaacatcgagcggctggacttcgacaacagctatatgtatgtctatcttgaccgcgcctacgaggcgaacgagacgttttccttcgcctactcgtgggtgcaggagtatatgtatcagctcagcaccaacggcgttatcgaggactatgacaatgttcactacgactatgtgaactacgactacaccgccgggtggttcgacgaggcgaggatcgggcagatggtgctggtgtggaacgacccggccgggcttaccggccagctggagagcaccggcaccgcgtcggcggagttcgtccggagcgaggacaagctgatctgcaccgcctccgatctggactacggctacaaaatgaacgtacaggtgcgctacaccgactggcccacccagctggcggaggaatacagcgccgacaatctcccctccgactacgacccctatgtgtatgtgccgtgcgagcattttgaggacgacaccggtgcggagatcgtgggcatggtcatcatggtattcgtggtgatattcctgatcgtgctgatctccgccgcccgccggggcgacggctacgccggcggcttcggcacccggtacgtgttcgtcaaccacctgtggtaccccgccgggccggacggcaggccccgtcccggcagcgtgggcaccaaaacaaagcccagaccgcccagaagaggtggcggcggcttcggcggcggaagccgtggcggcggctttggcggcggcggtttcggcggcggcagccactgtgcctgtgccagcagctgcgcctgtgcgtgcgcctgtgcctgtgccggcggcggccgcgccggctgctcggccaagaacctctacggcgtgggcctggacgagacactgtccgaaaagctctgatacaaaaaacatcccccaaccgggggatgtttttttgcttacgagtattggaaacctctgcccggctccttgaactccgccacacgcttgttgaagctggcgaaggccgcgtcctcgaaggccagcgtgtcctcggcgcccatctgccgcagcagccacttgcacagcggaggatttaggatcagcagcggaccgatcagcgccgtagcgtacagcccgccccggcggaagccctccggcttcgactccggcgtgcggcccacgccccgcacggtgtcaaaccagccctccgcctccgctgcgtcgtagtggaagccgaacaggctcttgaagccgacgacctccataccgtcaaaggtgcccaggaagaagctgttgtgccgcttcatcatggtgtaccgcacccgcccgggcagaatgcccagcccctgtatggtgtcggcgctgtcgctttctatggcggcggaaaacacgtccggcgcgttgccggtcagcaggatcagctgtcccgcgtccgcccttgcggcgatgtccgcggcatagggccgcagggcgtccgccgccagacgcagcccctgctccgtggtactgcccatatagaccagcgccacatcctccgtgaggaaccggggtttgctatgcaggtccgtctctatgatctccagcgccgggcagcagcgcttcagatagtagatgttctgcagatcgccgtacaggttgcagacctccggaaacagaatttccgccttcattgcgcgccctcctttgccagcagcttttccttcagcttttccctgacccggaaggccaggggcgtgccgtccacgccgtagagcagatacacgtcgtcgccgggggtcagcggcaacagctccagggcggcgaactcgtcctcggccagccgtatcttctgccgggggatgcccgccagcagcagccgcagctggtagtcataggcccgcggcccggcgcagaccaggcacgtcacatcatcgctgttcaggaattcaaaatccgtgtcgtacatccagctggggttttccgaccagcttttggccacgcccaggcagttcatcatcagcagcagctccttcttccccggcttggaccggatatagtcgaagttgcgggagcaggccagagcgttcttgtccttggacatctgcataatgaccttcacgccgccgatctcctcctcggacagccggctggcggggatcttcacctccgccatgcggcgggcgatggtgccgtggtcatagcccagccgccgcagggcggcgataaccgtcaccgtgttgtagatgttgtgcaggctgtcggtgatgagggtgtacgggtattcctgccccgcctcccgtatgcacatggtgtgggcggcggtgtccacctttgtggccagatagtcgcagtcgggggagtggaagccgcagctctcgcacacggcccggccgatgtggtggtagcggcggtattcataccgcagcttcccggcgcatcgggggcagatacgcatatcgttcagcaggttctcgcattccgtcacgtcggtgggcagccggtcgatgccgaaatacacccgctggttctccggcgccacagtgcaggagatcaggtcgtcggcgttgaggatcagcttgctttccttaggcagggaccgggtcagaatgtccgcgatgtagcccggatgggcgttccgcatgatggagtcccggaacaggttggtgatgacgatgtgctccggcttcacatagggatagatcctgggcgcggagcgctcgtcgatctccaggatcgccaggtcgtactccggcttgacccggcccagcaggccacagcccttcagcagcgccgtgctgacgccggagatgatgttgctgcccgcccggttgctgagtacggtcttgccctcggcggtgagcacgtcgttcagcatattggccacggtggtcttgccgttggtgccggtgacggctatgatgtgctccggcttgccgatatacttcaaaaagtccggacacagcttcaccgccagactgccgggaaagtccgtgccgttgtggcgggtgatcttcagcgccgggatggacagctttgccatccacagcgcaaacaggaaccgcagtttacccattgtcattcctccagagcgatggcgcggcaggagcagccatcggcattctcaaatttcaggggcagcgtaacgaacgtgaagcgtcggcccagcagcttgtccagccccttgaggttctcggtgttcacaaagtccgcgcccagcagtgtcatgtggttgggaaaatccacgctgtcgcaggggtccagcgagatggtgtcctcgcccacgcccttcagcggcaggccggccagatatgccgccgcctccgtcgtcaggcaagggaagtcctcgtagtagtccggtgtgccccactttttgtcccagccggtgcagaacagcacgaagtccgcgccgttcaggtcatagctctgcagcagcggcagggtaatggcgcgctgcccccggcagtccaccaccacggcgggaccggcgaacttcgccgcgtcatagcggtccagcgccgtaccgtcacggagcatatgggccggggcgtccatgtgggtgccagtatgggagaacatatgcagcagcgtctcccggtagccgcactggtcgatcgtgcaggcggtggtcagccggggctgctccgtgccgggatacaccggcatatcgttccgtatggtgtgggtcagctcatgtgccgtcatgcgtccgcctccttgtcgtgtgtctgcagccagatcagcagcgctgccacgtctgccggtgacacgccggacacccgcccggcctgccccacgttcagggggcgcagcgcgctgagcttctcccgcgcctccagccgcagaccctggatgtggtcgtagtccatatccggcggcagcttccggcgctccagcttctcaaattccgccacctgccgttgctggcgctggatatagccctcgtacttcacggtgatctccacctgctcccgcacctccgcgggcaggtcgggtcgatttgcgtcgaattctgtcaggtccgcataggtcaactggggccgccgcagcagatcgatcaggcggcagccgctgtccacggcggcggtgccccgttctgttagcagggcgttcagctccggcgtgccgggtatgcccgtgcgctccagccgccgtatctcctttgccacggcttcgtacttggcctccaccgccgccagccgttcatcgctgaccagccccagctcgtgcccgatagggcacagccgcgcatcggcgttgtcctgccgcagcagcagccggtattccgaccggctggtcatcatgcggtacggctcctcggtgcccttggtcaccaggtcgtcgatcagtgtgccgatatagctctcgctccgcttgagcaccagcggctcccggccctgcagcttcagcgccgcgttcacgccggccacaaagccctgcaccgccgcctcctcatagccggaggagccgttgaactgccctgcaccgtacaggccgggcactgcctttacctccagtgtgggcagcagcgccagcgggtcgatgcagtcgtactcaatggcgtaggccggccgcatcatcactgcgtgctccagccccggcaccgtgtgcagcatctccagctgcacctcctccggcatggaggacgagaagccctgtacatacagctcctcggtgtccagccccataggctcgataaacagctggtgccggagcttgtccgcaaagcgcaccaccttcgtctcgatggacgggcagtaccgggggccgatgccttcgatgaccccggaatagatggggctgcggtccagattttcccgtatgatccggtgtgtctcctcgttggtgtaggtcagatagcacaccgcccggttttccggcacgtcctttgtctcaaagctgaagggcagcggatccgggtcgccctcctgtatctccattttgctgaagtccacgctgccccggtgtatccgcggcggcgtgccggtcttgaaccgccgcaggggcagtcccagtgcccgcaggctgtccgtcagggcgttggctgggtgcaggccgtccggcccggaggactcaatgcactcgcccacgatggtctgcccggtcaggtaggtgcccgtgcacagaatgaccgcccgggcgcccagcaccgcgccggtgcggagcaccacggcggcggcatggccgttcccgtcgcagcgtatctccgttacctccgcctgccgcagcgtcagccccggctgcaattccagcgtgtgcttcatcacctgctggtatttccgccggtccgcctgggcccgcagggaccacacggcggggcccttgccccggttcagcatccggtactggatgcaggccctgtccgccgcccgggccatctcgccccccagtgcgtccagctcccggaccaggtgacccttgccggtgccgccgatggccgggttgcagggcatattccccaccgcgtcaaggctcaccgtcaggcagacggtcttcatgcccatccgggccgccgccagggcggcctcgatgcccgcgtgccccgcgccgatgacggccacatcatagtcgccgccgtgaaactctctcatcaggtgctcacctcaccacataagactgcttgaacactttattatactatacagcacacaacagcgcaagagtgttacacagaaataacccataggtattgtgcaatgtgcaataaaagtttacaaaagctttatacataatatccaattttgcgcttgttatccgggctgccgcggcatataataacactgtaaaacggaagaaaggagcgtgatatcaccatgacgacaacttggatctggggtgacctggatgacatgatctttgccgacagcgactgggaagtgagccagcggtaaggcataccgatgaggaaaccacgcgaaagcgtggtgatttgcttttttatgggtgtttttcgacagaaaacgcctcctgcacatagatcgcaaagcctgatccccgcgcagcaaagatgaaaagagacggccaacgccgtctcttatttgttattttcggttgctcttaatgagatattcgtgataccttaacgatattttagcgttaccttagcgataatgtatgttataataacgtcatcaaaaggaggggagggcggctatgaccggtaagcaagcccgccggagacagctgctgcggaccattggcctgcacttttccggcatggatgttctgaaggcgctgggactctacctggcagccgttatgtgctgtctgctgcttcgcagcttcgatatgcacaacgacaccagctacgtagccatgatctttctgctggatgtgttccttaccgcctactggacggacggctatctgctgggcatcatcatggcagtggtgggggtgttcagcgtggacatcatctttacctaccccttctggcatatcagctttacgctgacgggctttccgctgacgttcctggtgatgatgaccatctccatcctgaccgctaccgttaccagccgggccaagcagaccgagcaggtgcgccgggaggccgaccgcgaaaagatgtatgccgacctgctgcgcgccgtgtctcacgacatccgcacgccgctgaccggtatcgtgggcgccaccaacgttctgctggagcaggacggcggactgacgcaggagcagcgccagcagctgctgcgatccaccaacgaggacgcccagtggctcatccgcattgtagagaatttgctgtccatcacacgcataagctctgaggaggctaaggtcaagaaagagccggagccggcggaggaggtcatcgagtccgccgtggccaagacccacaagcactacccggaggtggatatccgtgtccatctgccggatgaactgatgatggtgcccatggatcccctgctgatggagcaggtactggtgaacctgatggagaacgccgtcatccacggcgagacccaccatatcgacgtgaccctgtccagcgagggcaactgcgcggtgttcactgtggcggacgacggccgcggcattccccagcacctgctgccccggctgttcgacggctccgcccgcagcgaccgcagcagtgacggcaagcgcagcatgggcattggcctgtccgtgtgccgcaccattgtgctggcccacggcggcgtgatacggggagacaacagacaggagggcggcgcggtcttcaccgtgaccctgcccatgaaaggagaaaacgatgaagattaaagacaaagtcctgatcgtggaggatgagcagtccatcagcaactttatctccatgatcctcaccgccaacggcttcgacaccatcattgtccgcaccggcgaggaggccctgaccatgatcgcctcccattgcccggacatgatcgtcctggacctgggcctgcccgacatggacggcatggaggtgctgaaatctgtccgcaagtggtccaatctgccggtggtggtggtttctgcccgcaaccacgagcacgacaaggtggaggccctggattacggcgccgacgactatctggtcaagcccttcggcacctccgaactgctggcccgcatccgcaccgccatccgccacacccgcaccaccctttccaacacccagatcgcccagtccggcaagttcgtcaccggcgatctgaccatcgactatgataagcaccaggtgctgatgaacggcgagaacgccggattgaccgtcaatgagtacaagatcgtggccctgctgggcaagtacgccggcaaggtcctgacctacgacttcattatccgggagctgtgggggcccaaggccaagaccgacaatcagatcctccgggtgaatatggccaacatccgccgcaagatcgagcctacccccggcaacccccagtatattttcaccgaggtgggcgtcggctaccgtatgcgcgagggagactgatacataccgagaagaaaagaccgcctgcgggcggtctttttcatgtgcggcgcgtttcttttaaggaaaatatctgccgacacgaaccgacgcttaacggaaattttataatgtacggataaagaaaaaccgcatttccgctgtcactgtgttaagaaacgccagcccgtatttacagggcggttttttcgcagtaagatacaaacacgcccgccgcggcgcggcgggggaaacttgtaaggagagaaaacaatggaagaaagaaaaggctttggatccaatttcggattcctgatggccgcggtcggctcggcggtcggcctgggcaacatctggggcttccccaataagatgggcgcctgcggcggcttcacgttcctcatcatttacctcattttggctgtttgctgcggcttcatcgtcatggtgggcgagttggccattggtcgtaagacaggcaagggcgctgtggcggcatataaggcccttagcaagaagttcagctggatgggctggatgggcatcctgtccgcgttcttcatcctgttcttctactgcgctctgggcggctactgcattaagtatgtggtgctcaatgtaggcgacctgttcggcgcgggctttggcgccagtgccatcgccgccgcgtcggcggacgcggccagcgcctctctgggcgacgcggtgttcggcgctttcatgtccagcaccaccgaggccattatctatggcttgattttcgtggtgctgactatgcttatcgttctcggtggcgtcggcggcggcatcgagaaggtctgctctgtcggtatgcccgctctgttcgtggctctgctgatctgcatcatccgcgcctgcacgctggacggtgtggacaccaccgtgcaggtgctccaggcggacggttccctggtggagcacgtgatccacggcagcgccctggatggcctgaagtacatgtttgcccccggctgggctactgaaaatggatactatgttcccgcctccgccgtcatcgatggcgtgaaaatgtccgcggtggagatcaacggcgtcatgcagcgcatcgtgaccttcaagcaggagacacccgacgtcctgaccgtgctggctaccgccggcggccagatgttcttctccctgtccctgggtatgggcgccatgatcacctacggctcctatctgcagaagaaggagaacatccagaagaacgcgctgctgatcgtggccatggatacgatggtggctctgatggccggcctgtgcgtgctgcccggtcgctttgctctggatccctccggcgcagtgggtggcccgtccctgctgttcgtcaccatgcagaacgtgtttagccgcatgggcggcctcggccccatcttcggcatcctgttctatctgctggtggtgttcgccgccatctcctcctctatctccctgctggaggtcatcgtggctcactttgtggataaggcccgcgacgagggcaagggcgacaagcgcaagagctataccctcatcgccgccgcggctgtgggcctgggctgtatcctggtctgcgctgaccgcctgggtgccagcagcttctcgcctgcggaattgctgaacattgcaaatcccaagacctgggctgccgactggctggacttctgggatgcgctgtccgagggcgttatgatgccgctgggcgcgctgctgatgtctctgatgatcggctgggagatcggccccgagttcgtcaaggaagagacggaacagtccggtcatgtcatgggcagctacggcttcttcaaggtctgcgtcaagttcatcacgccgctgatcatggtcctcatcctgtacggtcagataaaggaattcttcctgtaaagtctcttgacgaattgttaataaacaaactcttacttaacagaggggacgccggtgccgccgcaccggcgtctctttttgcgcccgcggacccggaaaggcttgtgccgcctgccgtaaaaagcacacgatgctgtgtttgccgcccggtttctcttgtaaaaacgacgaaaacggagttcacaatttgttaaaataatggaatatgacgttaagaacttgacaatatcttggcgtgacggtatgatacaggaggttggcggggcagatacgctgtttcgccggctgatggtattcaccaccaatttgtgaggaggtaaatcacacacatggaaaagaaaagcactaaaatagcgtatttcgtagcgctgggtgttttcattgtcctgctggtcatcctggggatccagtttaagggcaaggaaaaccccgtcttcgtcggcgacggcgcgttctacaccaccggcgacggcgtgttcctggatggcatccagcggaccgtggatgacagcgagggctctaagtatgcgctggacggctcctactacgtgagccccgaggccggcacctacttcgagctgtctgaggatggcaacaccattgtcggcgctgacggtaccgagtacgtcaagtccgagaccaccagcaaggacgtcaacggcgtggagtacaccacctatgaggagcaggtctactccgatacgcccttcgccggtaccttctggtccctgctgccccccatcgtggccatcgtgctggccctgatcagcaaggaagtgtattcctctctgttcctgggctgcctggtcggcgcactgctgtacacccagttcgctccctgggacaccatcgtgaccctggtgggtgccgattacggtatcatctccgtgctggctgacggcggcaacatgggtattatcgtgttcctggtcaccctgggcatcatggtggacctgatgaacaagggcggcggctccgaggccttcggccgctgggccaagaagaccgttcacacccgctgcggcgcgcagctgctgaccatgctgttgggcgtgctgatcttcgtggacgactacttcaactgcctgaccgtgggcgccgttatgcgtcccgtcaccgagtcccacaagatctcccgtgccaagctggcctacgtcatcgactccactgcggctcccgtctgcatgatcgccccggtgtcctcctgggccgccgccgtttccggctacgtgcagtcccccagcatcaacggcattgagctgttcctgaagcagatcccctggaactactactgcctgctgactctgctgatgatcgtggtcatctccgtgctgaacatcgactacggttccatgctgacccatgagtacaacgcccaggtcaaggacgacctgttcaccacccccgagcgtcccttcgccggtgccgacgactatgaggctcccagcaagggcaagtcctccgtgctggacctgctggtgcccgtgatcgtcctgatcgctgtctgcatcatctctctggtctactccggcggttacttcgatggcggcatgaccttcatggaggctttctccgctgccgaggccggtccggcgctggccatcggcggtctgatcggctgcgtgttcacgttcgtctacttctggctgcgcggcgccatcggcttcgagaagtccatggaatccgttccccagggcttcatccagatgatcgcccccatcctgatcctgaccttcgcctggaccctgtgctccttcacccgcaatgccatgtactccgctgactttgtcagtaatgctatggccaacgttggtgatctgcgtatgttcctgcccgccatcatcttcatcatcggcgcggctatcggcttcgctaccggtacctcctggggcaccatcggcatcatggctcccatcgttgtctccgtgttcaactacgacgcggagcccatactgtgcaccatcggtctggcggctgcctgctccggcggcgttatgggcgaccactgctcccccatctccgacaccaccatcatggcttccgccggtgcccactgctaccacctgaaccacgtgttcacccagatcccttatgcgctgaccgtggctggtgtgtccttcgtcagcttcatcctggccggtctgatccagaacgtgtttgtcaacctgctgatcgctgtggccctgatggtcggtacgctgttggtcatccgcgccatcgttgccaagaagcacgctggtattttccaggaaatggccgaggccgacaaggctcttgccaagtaagctataccccacctaataaaaagaaagccctccattgggggctttctttttttgcgtatactatgtcggcatatcgctataaatgccggcaatatttgctaaaataaacatatatttccaaaaaaggaggggagaagcgcgctaagaaactgtaaaggtttataataatgtcataaatattccgaaaaatggccgctaaattggataaaagggagaaaaacaggttcataatttgttcaaaattacccgcccccggctttgctgaaatgttgacaatctgccaggaaaacgttaggatggtggcaccaatttgtgaggaggtaaatcacacacatggaaaagagaagcaccaaaatagcgtatttcgtagcgctgggtatcttcattgtcctgctggtcgtcctgggcctgcagttcaagggcaaggagaaccctgtcttcgtcggcgacggcgcgttctacaccaccggtgacggcgtgttcctggatggcatcctgaagaccgcggacgacagcgagggctctaagtatgcgctggacggctcctactatgtgagccccgaggccggcacctacttcgagctgtctgaggatggcaacaccatcgtcggcgccgacggtaccgagtacgtcaagtccgaagagaagtccaaggacgtcaacggcgtggagtacaccacctatgaggagcaggtctactccgagactccgtttgccggcaccttctggtccctgctgccccccatcgtggccatcgtgctggccctgatcagcaaggaagtgtattcctccctgttcctgggctgcctggtcggcgcactgctgtacacccagttcgctccctgggacaccatcgtgaccctggtgggtgccgattacggtatcatctccgtgctggctgacggcggcaacatgggtattatcgtgttcctggtcaccctgggcatcatggtggacctgatgaacaagggcggcggctccgaggccttcggccgctgggccaagaagactgttcacacccgctgcggtgcgcagctgctgaccatgctgttgggcgtgctgatcttcgtggacgactattttaactgcctgaccgtgggtgccgttatgcgtcccgtcaccgagtctcacaagatctcccgtgccaagctggcgtacctgatcgacgccactgcggctcccgtctgcatgatcgccccggtgtcctcttgggccgccgccgtttccggctacgtgcagtcccccagcatcaacggcattgagctgttcctgaagcagatcccctggaactactactgcctgctgaccctgctgatgatcgtcatcatctccgtgctgaacatcgactatggctccatgctgacccatgagtacaacgcccaggtcaaggacgacctgttcaccacccccgagcgtcccttcgccggcgacgatgagtacgagaccggctccaagggcaagtcctccgtgctggatctgctggtgcccgtgatcgttctgatcatcatctgcatcgtctctctggtctactccggcggttacttcgatggcggcatgacctttatggcggctttctccgctgccgaggccggtccggcgctggccatcggcggtctgatcggctgcgtgttcacgttcatctacttctggctgcgcggcgccatcggcttcgagaagtcctttgagtccgtgccccagggctttatccagatgatcgcccccatcctgatcctgaccttcgcctggaccctgtgctccttcacccgctttgccatgtactccgctgacttcgtcagtaatgctatggccaacgttggcgatctgcgtatgttcctgcccgccatcatcttcatcatcggcgcggctatcggcttcgccaccggtacctcttggggcaccatcggcatcatggctcccatcgtcgtctccgtgttcaactacgacgtggagcccatactgtgcaccatcggtctggcggctgcctgctccggcggcgttatgggcgaccactgctcccccatctccgacaccaccatcatggcttccgccggtgcccactgctaccacctgaaccacgtgttcacccagctgccctatgcgctgaccgtggccgcagtgtccttcgtcagcttcatcctggccggcctgatccagaacgtgtttgtcaacctgctgatcgctgtggccctgatggtcggtacgctgttggtcatccgcgccatcgtcaacaagaagcacgccggcatcttcgccgaaatggccgaagccaacaaggctcttgccaagtaagtacatactccagcaaaaaaagagaccgcttcggcggtctctttttttgcgcgcagggcaggggagggcacctcgcatcggcggcgggacagcaaaagctgtccgccgcgggaattttgcgaaaagatgtgacaaaccgcaacgaatgtggtacaatgtccctattgagtacataggaggtgtcgctgtgcggcaatatccccaattagagatcgatctttctctgctgcaaagcaatgcccgggcggtgatctcccgctgcaatgccgcgggtatctgtgtctgcggcgttatcaagggtgcggatggcctgccggagatcgcccggacgctgcatgctgccggcgccgcagagttgggcaccagccgcctggagcaggtggccaaatgccgtgccgccggtgtgcccggcccctggctcctgatccgaatccccggtctgacggagctgccggatgtggttgccctgtgcgatacatccctgcagagcgagtgggccaccctgctggcgctggaggaggagtgtctccgtcagaacaggacccaccgcgtcatcgtgatggccgacttgggcgacctgcgtgagggcttctgggacaaggatgagctggtggacgtctgccagcgggtggagcaggacctgccccatgtacatctggccggtatcggtgttaatctgtcctgctatggctccactaagcccaccccggacaagatgaacgagctggtcgctttggcccgccgggtggaggcgcgtatcggccgatcgctggaggtcgtctccggcggcgctaccagctcctttacgctggtccattggggcaccatgcccgccggtatcaaccacctccgaatcggcgagggcatcctgctgggcaaggatttgcaggtggactggggtatccgtgatatggattacctccgcatggacacctttaccctccgggccgaggtggtggaggtcaaggacaagcccacctatcccatcggcgagctggccatcgatgccttcggccgcaagcctacctatgtggaccgcggtgtccgccgccgcgccctcctggccctgggccgggccgacgtgggcgacctggagagcctgctcccccgtgagccggggctgacagtcatcggcggatcctccgaccactgcatcgtggacgtggaggactgcccccgccggctgcaagtgggcgacatcgtggaattctcgctgtgctacagccatatgctgtacgccacatcacggagcgatatgcggctcctattcaaacatcaacaggaggagtaagaaatgggagatttaggaattttgatcatcggcgtcgtggacacgttttttgccttttttgtggtggcgcccatgatgctgcaggcggccagcctgttcggcgtgcagaagcagtttgcccaggccatggtccaggagggcatcgtcaagcaggaggacgtggaccgcatccaccccaagaagcagatcgccggtgtggtgatctcgctgatcatgctggcggtgctggcgtttacctgtgccaaggcctccccttggggctatatctgcggcggcgtgggcctggtggtgggcctgctgaagtaccgcgccatcgttcagtacaacagtgaaacggtcaaacgcttcaagaacacctataaggacgagatggatgtggccaagttcaacaagtttgtggagacgcatttctgataagttcaagcgaataaaaacctccccggcgccatgcgccggagaggtttttattcgcttttttcgatggtgccgccgcccagtacctcgtcgccgtcatacagcaccaccgcctgcccggcagtgatggcccgctggggctgatcgaacaccacccgcagtccgccgtccggcaggggataagcggtgcagggggtctccacctggctgtaccgcgtcttggcggcacaccgtaccggcaccgccggtatctggccgctgatccagtttacatgggatgccagcaaggaggaggcatacagcgccgcgtcgtctcccagcacgatagcgttgcggtcccggtccttttccagcacatatacgtgccgtcccaccgccacgccaaggccctttccctggccgatggtatagcagggcaggccccggtgtcgtcccagcacgcggcccgcttcgtccaggaagtctcccggcgtcagtgtcagtccctgccgccgcagaaaggtcacatagtccccgtccggcacgaagcagatgtcctggctgtcgcccttgtcggcgttgtccagccccgctgcccgggccttgtcacggatagccggcttgtcatagtctcccaccggcagcagcagatgggccagctggtgctgcgtcagctgatacagcacatagctctggtccttccgccgttccgcaccccgcagcaggcggtatctgccgctttccgcgtcataggccacccgggcgtagtgccccgtggcgatatagtcataccccagcgtcagcgcccggtccagcagggcgccgaatttcagctcccggttgcagtcgatgcacggattgggcgtccgcccggcggcgtattccgccgtgaacctgtccatcacgcaccggcggaagcggtctgtctcgttgaatacatagaaccgcatccccagacgtgtggccgcctgccgtgcgtcctcggcatcgtcggcggagcagcagcggctgtcctcgttaggggccagcttcagcatggcaccgtcgcagtcgtagccctgctgcaccagcagtgccgccgcagcggagctgtccacgccgccggacatggccaccagcacctttttcttgctcatacgatcgctctccatagtctatatgtctcccacgcccgcatggggcgtatgcaccgccattcagcggcggcgcatactttcgggaaaatgtggaaagctatcgggcgaagagcgccatagcaggcaggggcgcgtccctgccgtgccgcggcggccctccgcccgacagcgtgttcttattcgtccagatgctttgccaggaatgcctcgtcgggcagcgcgtccgccagctccagcagtacccgctggaagccgccggtgtagtcctcgatgttctcgcccagcgtccccaaagcccgtaccatcggcagcgcgatggtggcagtggtgccctggtcctcccggctgttcagcagcagctggccgccgtgcagccgcgcgatctgatgcgccaggggcagtcccagccccacaccgccggcgacatagtccagggtcatgggccgcatatgccagcgaaacagcatttcctgccggtcggcaggaatgccgcagccggtatcctttaccttgatgagcacatggggcttctgcacggccagcgtcaccgtcacctttccaccggcggagcaggccttcagcgcattggacagcagctgccacagggcctggctcagccaaggctcgttgacggcggtgatggcgtaacgctcctcgcacaccatctccagctgcacgcccttcagctcgaaggggacctccgcctcccggatgatctcgtccagccacaccttcaggtccgtgttttcggtgggcagcagctccttgcggttcagcatagaggcggactccaggttctttgccagccgcagcagccggaaatagccatggtagagcatggcggcgttcgcgtccagtatcggatcctcgtcccgttcatcggcgggggccagcttctgcatcccgtagtagatattgcccagtgcggaccgtatctgcatcgccaccagcggcagccgctccatgtataccttttcctgctgtgcctgttccatgagaccagcctccttctgttgtcagcataccagtttcccggcaccgtcaaccgtgccaacttctgtcagcttgttcacatcatatcaaatgcggtgcaagaatacaagatttttatcaaatttccgcgaaacgaaaaaaagtttcaaaaaaggcttgcattttgcggaataactgcatataattctaaacataccatacatttaggatattccatcagagaggaagatgttttatgagcattaaagtcggtatcaatggttttggccgtatcggccgtatggtcatgcgctgctgcatggatcaccccaacatcgagatcgtgggcgttaacgacctgtgccccgccgattacctggcctatatgctgaagtttgacaccatgcatggcaagttcaagggtgaagtttcctccgagggcaacaacatcgttgtcaacggcaaggccatccccgtgtttgccgagcgtgaccccgccaacctgccctgggccaaggtcggcgccgagtacgttatcgagtccaccggcctgttcctgaccaaggagaaggccgccggccacatcgccgcgggtgccaagcacgtggtcatgtccgccccctccaaggacgacacccccatgttcgtctgcggcgtcaacctggacaaatacaccagcgatatgcagtttgtctccaacgccagctgcaccaccaactgcctggcccccatcgccaaggtcctgcacgataatttcggtatcaccgacggcctgatgaccaccgtgcactccaccaccgctacccagaagaccgttgacggcgtctccctgaaggattggcgcggcggccgtgccgcctccggcaacatcatccccagctccaccggcgctgccaaggccgtgggcaaggtcatccccagcctgaacggcaagttgaccggtatgtccatgcgcgtccccaccctggatgtctccgtggtggacctgaccgtcaacctggctaagcccgccaagtatgaggatatctgcgccgccatgaagaaggccagcgagaacgagctgaagggcattctggcctacaccgatgaggacgttgtttcctccgacttcctgggcgacacccatacctccatcttcgacgccaaggccggcatcgcactgaccgatacctttgtcaaggtcgtcagctggtacgacaacgagatgggctactccgacaaggtcctctgcctcatcgagcatatgtacagcgtggaccacaagtaaatcgcttactaccgaaaggttttccttctttttgttccgcagacagcgccgcgtcacgcggcgctgtctgcatacagagacgctgcgcgccgcctgtacagagggggaaagcgcttccggcggtttttgaaagaaaatcgacagcgtgacaaaattttttcatttaccccctaccattccactggattgtatggtacaataggtacaacttacctaagggtaacgcaagggaaaggaaccccgtcatggaacagaactccattctgcacactacgctgtcgctggacagcgatatccccctctacgcccagctggtgggcatcatcaagcgcagtatctccaccggcgccctgccggtgggtgcgctgctccccagcgaggccgagctctgccgctgcctgagcatcagccgcaacaccgtccgtcaggccatcggagagctggaggacgagggtctggtggtccgcaagcgcggccgcggcaccttcgtggccgaccccgccaccaaccgccggggtgtccgctattccttcaccaccgaggtctcctctatgggaaaggtcccctcatctacgctggtggacttcgctgtggaggtccccaagcccaccgtctgcgagaagatggagctgcgggagggaacgccggtctactgcttcacccgtgtccgcaacgtggacggcgagccactgatcctggagaccagctactacccccagtacatctaccccaatctgacccgcgatatgctccagacccacagcttttacagcctgctttaccatgtgggcatcgtccccttcgccgcggacgagagctatgaggccgttattctggaggacagctgtgccgccctgctgggtgtgccctccggcagctgtgcctttttccaccagcggctcacccgtacggaggatggccgtatctacgagtatacccgcagctacatacgcggcgaccgggtccgcctggacgtacatatgcagaaaagcggcatgaacttcgtccgcaccatcgactgaatagaaaagcacccccgacagggggtgctttttccgcataaagccgcgcccaaagggcggggcagcgctatttacgacagcagcaggcgtatcagcacccgggcgatggcatagcccagcacgccgccgccgatgccggcggctgtggcccacacccgtttccgcttggcgtggggcacctgctggctgtacagccgctgattttcccggttcaggcccaccagtgcctccgggttccgggcggacaccgcctgtacgatagcgtccgccgtccggcggctgccgccccttttgagctgcagcgtgatgctgcgcccgtcataggtcagcagctccaccaccgtgcttttggcccacagcagctttaggtcgtgacgatagacccacagcacgtccgccaggggcagcacgatgttctgccgccgcccgtacaggaacgccgtgctcaccagcgcgtcagagcgtcggtcaccctccagatagtggaattcgctctccgcccgttccagcagctttccctttttcagctgcttcagcgtgctgttcagttgtgcggtgtacgaggcggcgcttaccagcagcacaaaggcggccagcccgaggaagctggctatgagggaccaaaagctgctccccgtgtccggtgtcagctcgctgtcgatgtaatagtcgccgtaggtgtacacaaagtcctcggcggtcatgccgacggcggcggcaatatcgtcgatatatgcctccggcgtctcacagatcacgcccaccagacgtaccggtgccggcgcggtggtctccgtcagcgggatatagacggccagctccgagggcgcggccgtatcgtccggtactgcgccgtcaccgctgtcgtcggtataggtatagtccacgatatccgcgaaccgtgcatattccgcgtcgttcagctgcaccagatagccgtatccctccgtgtcctccgccagatagaagaccagcttgcgcccgtcgcccagcgtcacccgataggcccaggtggtcatgtactgcacgtcgatgtagttgtagtcgcccagatagatctcgtccccgatgggcacggcctccgctgccgcgctgtcccgctgcgccagcagccccagcacgatacaccccgccgtcagcagggccagtatgccgcccacgatccaccaggcaggggagtgtcttacgtatcggcgcatttccatatgttgcccctccaaatttgttgtggtacgacatattgtaccatattctgccagaatgtgcaatatcatttcccataaacggcataaaaaacgcaccccgggtctgacccaaggtgcgtttttcattcacagtgccgctgcaccgatgatacccgcctcgttgcccagccgggcacattcaatcaccggcggtgtccggtcgtgtccgccgaagcagttggccgccacatacgcccgtatgggggccagcagtctttcgccctggcggctgatgccgccgccgatgagcaccatctccggccccaggatgttcaccaggtccgtgatgcccgccgccacgtacacgcagtaccggtctaccacagcctgcgccgccgcatctccggcggccgccgcgtcgaatacgtccttaccggtcagcctctcaccgtatccggccagcagggactccggctgcgccgcggccgcccgctttccctgccgtatcagcgctgtggcggaggcatacgcctcccagcagcccttccgaccgcaggtgcagtcctcgccgtccagcaccagcacggtgtggcccacctccgcgccggtgccgcccacgccctccagcagttggccgtcggccacgatgccgccgcctacgccggtgcccagggtgatgagtatcatgttccggcagcccacggccccgccggccaccgtctccgccagcgcggcgcagttagcgtcgttgctcagatgacaggggagccccagccgcgccgtcaccatgctgcataccggcacattgaaccagcccaggttataggcccgcaccaccacgccgttggcgctgtcgcaggtccccggcgagccgatgccgacggacgcgcagtgcgccgccgtgatgccggccttctccatggccttctccgccgcgcggcagatatccgcgacaacggcctccgccgggcgttccgcaccggtgggcaggctgacctccgccacgatgtgctggccctcgtccaccacgccggcggcgatgttggtgccgcccagatcaatgccaatacgatacatatgctgcctccttgcgctttctgtccccgcgttccggggaaataaacggggcgggcgtatcgcccgccccaagtgcgtttctgtctcagatatgggtcacaaaatcggtgttcaccgccaccggccgtgcgatgtcggaggaccggatgctgccgaagatggtccgcatcgtggtcagagcctccttgccggacacctccggctcccggtcatggaccagcgcgtccacaaactcgtcgatgacgccggagttgtgggacgttgtctcgaaggcgaagctggtgcggttgccctccaggtcattgatgatgatgggggccgacggctcgctgtagatcatcatcaggcccttggtgccgtacagcaccgtggactggcactcgtggccgtacaccgtccaactggccgccatggtgcccagtgcgccgccggacattttcaggatgcacagggcgttgtcatccacgctgatgagcttgccgttgtcgtcacgcttattcagggtgactaccttggcggtggtctcgatgaccttctgcccaagcaggtactggatcaggtccaccttgtggatgcccatgtcggacagggcgcccatggccgccttgttcttgtcaaagaaccacgtgccctccaaggaccagccctcggggccggagttgcccagaatggtgcggaaggtgatcacatcgccgatgatgccgctgtccagcatttgcttggccttgcggtgcaccgggtcaaaacgcatgttgtggcccaccatcaggtgtctgccattgcgctcagcggcggccaccatggactcgcactccgccagcgttaccgccatgggcttctccaccagcacgtgcttgccggcgtacagcgcagccgtgcagatctccgcatggctgcggttttccacgcatatggacacggcgtccacgttgggatcatccaccagctcatagaagctgttgtacaccttgccgccgtactgcgccgccatctcctgcgcgcgctccatgttcttgtcgtagaatgcgacgatctccgcattggggttggctgcatactcaggcagatggcgcacctgtgcgatcttgccgcagccgataatgccgactcggatcataaaaagcgaacctcctctgtccgtcctcaaaccgccgggcgccctgcgctccgacgtatgtttctgcccctattgtaccaaaagaaaacgggaaagaaaagccttttttgccaactttgcaaaatttttcacaaaatctgcgccgcgatggtgagggcgcagcccttttgtgccgtatagtccagcgttacgcctgccggcaggctgaagcggctcagcgccagcagcggacccttgcccgtcagcttgaacagcgcctccttggccgtccatatctcccagaaccgctggcagtcgccgtcgtccccggaccgtatgtacgccatctcctgctcgctgcatacccggcgcatgaacttctcctgggccgagcgtaccacctccacgtccacgcctaccggcgcgtccgccgttacgcataccgcccacgggccggagtggctcacggacacatacacgccatccttttccacgctgggcttgcccagctcgtcccactgaagcggcacgtccttctccgcgcagcccatcgtctgcgcgagcatccgccgcgccagcagctctccggcgatggtgcgcttccggtcgtcctcgccggcgatgtcggccacacgccgccgccgcgtctcatccatcatgcctatcacggtctgggccgcgtcctccgtcagctcccggatgtcaaaccactgcaattccatatcccgcgcctcccgcgtcgtatttttcgcacccattgtatcacatcctgccgcgccgcgctactgctttttcgccgccgcaggcttttctctgtactttccggtacttccaccccttgcccaggggacgcggcggtggtatactatccccgtatctgtagttttccatgaaaggagatgacgccatgacccgtgatgagctccgcgccaaggccaacgacctgcccctgctgcccggcgtctatctgatgatggacaagaccggccaggtcatctatgtgggcaaggccaaaaaactgaaaaaccgcgtcagccaatactttcaggacaccgccagccacaacgagaaaacgaagatgatggtggcccatgtggaccggttcgacaccattatcgtccgatcggagttcgaggccctggtgctggagaattccctcatcaagcgccatcagccccgctacaacattctgctgaaggacgacaagggctatcccttcgtgcggctggacagcggcgactacccccgctttaccctggtgaaccgcaccgccgacgacggcgcgaaatactacggccccttcggcggccggcacgaaacgcgcctggcgctggacgccgtgtgcgccgccctgcgcctgcccacctgttcccgaaggttcccccgcgacatcggcaaggagcgcccctgcctgaacttccacatgggccggtgtgacggcttctgccgcccggacggcccggacgcggcggaataccgccgccgcatggcccaggccaccgccctgctggagggcaagctgcgcgccgtcacgacccagctgacggaacagatgaacgccgcggcggaggccctggactttgagacagccgccgccctccgcgaccgtgtgcgggccctgtccgtgctgaccaaggaccagcaggtcatcgccggtatctgcgccgacaccgatgtctggggcgcgtataccagccccgcccggtccggctgcgccattctccacattgaagacggcgatctcctggcccggcagaccgaggtgttccccgacgctgccgacagcgagagcgccctgctttccgctgtggtgccccagtactatctgacccgccagtccctgccccgtgagatattgcttcccgccgccatcgaggacgctgacgcgctttcggccctgctgacggagcgcagcggccacgccgtggccctccgggtcccccagcgaggtcagcgccgcgcgctgctggacatcgcccaccgcaacgcccgggaggaggtggagcgcgttaccgacgccgtacagcgcattaacggcaccctgcgccttttgcaggaaacggctcagctgccggtcctgccccggcgcatggagagctatgatatctcccacaccggcggcgcggaccaggtgggcggcatggtggtctttcaggacggcaagccgctgaagtccgcctaccgccgcttccgcatcgagtcctgcgccggcgccgacgactacggcgccatgcgtgaggtgctcacccgccggttccggcgctatctggacggcgatgaaaagtttgcccccctgccggacctgctgctgatcgacggcggtcaggagcacgcccgcgtggccgagcaggtgctggcagagaccgggctggatgtgcccgtgctgggcatggtcaaggacgaccgccaccgcacccgtgcgctcatcaccgcccggggccatgagctgggcatacagcagacacccgccctgtttgcccttatcggcacggtgcaggaggaggtacaccggttcgccatcgcctaccaccaccagaagcacacccgttccgccaagcgctcgcagctggacggtatccccggtgtgggcgaggcgcggaagaagcggctcctgcagcacttcggtaccgtcaccgcggtaaaaaacgccacgctcgagcagctctccgccgtggtgccggaggcggccgcccgggcggtatatgggaagttccacggataaaaagcggtacccccgcagcgccggaggtacgtcgtacgcaaaagaaaagagagacggcgaagccgtctctctttcattgtgtttactcgtccaggttctcgatcagctcagccagcgcatccacagcttccttctcatcgctgccgtccgcgatcagtgtcactgtggtgtccttcataatgcccaggctcagcacgcccagcaggctcttcgcgttgacgcggcgttcttctttttctacccagatgccgcttttgaactcgttggctttctgaatgaaataggtcgcgggtctggcgtgcagaccgacctcatttttcaccgtgatctcccgtgtatacatgaaccagcactccttacgcacatttttactctcgcgccagagggtgcagcgcgcagaaactaaccctcaccatttcctattatactggattacggcaggattgcaatgggcattgatacgaaaatcccgcgatttgctctataattcccactgcaatttgtgaaaaatgatgtatcttgcagacaaattccggtatttgtccaatcgaaagctcacatcctggcctctgcccagtcgctgagctgctccaaaatgggcagcagtgcccggcagctgtccgtggggccgtattccacccgcaccggcacctccagatactcccgccgtgtcaccagcccgtcgcgctccagctcccgcagggccgaggccagcaccgtgttggagatgccgtccagcttgctccgcagggcgttgtagcggatggtcccggcgttggccacggcgcacaggatctgcaccttccacttgccgccgatcagctgcatggcgtggtgcagcggacatttctccatacagggacagtcgtagtggctttgcggcatggtctgtgacatggtaagcccctccttacttgcccataaaaatctgcgctcttgcatttctccaaagctatggtatcattatagcaggtaagaaaaccggagtaaatagcatgaggagaaaatcacagccatgaatatctatcttcaggggctgaccatgggtctggcctacgtggcgcccatcggcctgcaaaacctgttcgtcatcaacagtgccctgacgcagaagcgcagccgcgtctacatcaccgcgctcatcgtcattttctgggacatctctttgggtgtggcctgcttcctgggcgccggcgcactgatgcaggcgctgccctggctgcaaaaggtcatcctggggttgggcagtctgatcgtcatctatatcggcatcggtctgctgcggtccaaggccagtctggagggcggccgggacgtgaacgtccccatctggaaactggccggatccgctttcgtggtcacctggctgaacccccaggccatcattgacggcaccatgatgctgggcgccttccgggccaccctgaccaacggcggcgacctgttcttcatctgcggcttcggctccgcctcggtgatctggttcctgacgctgtccacggtcgtctctctgctgggcagtaagttcaacgagaaggtgctgaacatcatcaacaaggtctgcggcgccgtcatcatcttctacggcctgaaactgctgtacagcttcgtccagatgatgggttggctgtaaaacacttcacaaatcacgtcctttctgttacaataaggcagaaagggcgtgatctttttatggaacagaactaccggctcaccatcgcctacgacggctcccgcttcttcggctgggagcgccagccggacaaggataccatccagggcaagctggaggccgtgctgggcgcattgcaggggcatccggtgaacgtcatcggcgcgggccgcaccgacgccggtgtccacgcccgggccatgaccgccagcgtggtgctggacgtgaccgagacgcccgacgccatccgcgactatctgaaccgctatctccccgacgccatcgctgtccgggaggtcaaggaggccgcgccccgtttccacgcccgctataacgccctgggcaagacctaccgctatacctgccacaccgggccggtgaagccggtgtttgaccggaagtacgtcaccctgctggactacgacccggatgtggagaaaatgcgtcaggcggcggcctacctgctgggtgaaaacgacttcgccagcttctgcggcaatccgcgcatgaagaagtccaccgtccgtctggtggaccacatcgctatcgagcgccggaaggaccgggtggtattcaccttccatggcaccggctttttgcagaacatggtccgcatcatggtgggcacgctgctggaggtgggccgtggctactggacgccggagcaggtgcgtgacatcctggccgccagggaccgcaagcaggcgggtcccaccgcgccgccggagggtctgtgcctgatgaaggtggattattgagcaaaaagcatccgggcgctatcccggatgcttttgctgcgtaaaaatgacctaagccttggcttaggtcatttttgttacatattgtggatatcgtccagcagatcgtccagcgacatggtccgcacctcgtcctcgtcggcctgggtgggctcgtcctgggcagagcgctctgcgggcgccggcgtctccgccggcgcggcgggcgtcacgggcgccgccggggtcttgtcggggatggcggcaggctcgctgtcgctgctctcctcacggggcaccagacggggcacccgtgccgtgtgccgttcctcggggagcaggggcttcgccggggtccgcggcggttcgtcgtcgtattcctcgtcatcgccgccgcccgtgtggccgcggccgatcaggaagcccagcaggaacagcaccaccaccagcagcaccgccgccgcgatggccacatacacggtcttgacctcgccgatcagcggcatcgcaatggtcccggggatctccagcggcggtacctcggggatggtggccgggtcgatgacctccaccgtggggacaataccggtataggccggcatccgcagcacatggatggtatagttctgcttggtcttgccgtcctcggcggttccggtaaccgtgagcacagtctccgcctccgtggcggacagccgcacctcgccggtgccggtgatgccctgggccttttcgtcctttgccgtggcggcgatggtcacctgcttcgtctcataggggacgtaggcgatgtaatccgtcactgtgggcgtgaacgccggagacagcgtggcgccctccagcgtcagggcggcgatggatgcgtcggtggagggtttgtagttggggtcctgctggcgtgtggcatcgatggtatagctcttggtggcgccgttggccgccgtgaccttgatggtcacggtgttgacgcccaccgccagctcattgccgctgacagacaccgtagcgctgttgtcggcctttttgtagttcaggtccagcttttccaccgcgaagggcaccgtgcaggtgtagtacgtggtgctgctggagaaggaggggctcagcgtggcattggagcagctcagcgagctgagactgcagttgccgctgggggccgcgcccaccttgccggaccagctggcgctgtccagactggtgtcgctgttgccgtcggacaccacgatgttggagaacgtggcggtcagggcgtcgccctccttggcgctgccggataccttcattttgatggtgaccagtccgccgctggagctggacgtgccgtaaacgctgaacttgttgttgttgaccacgatgctccatccgctgacagagcagttgtagttggtaaaggacaaattgccgctgtagctcaggtcggcggtcagaccgtagaccttgctgggcacggacagcgtcagtgtgacggtgtcgcctgcctgcggggcggcggtgccggtcagcgtcgctccggcggcgtgggcctgcacgggcagcagcgtgaccaccagcagcagcgtcagcagcgcggaggccgcggcgcggaacagtttgtttttcataggatgtttcctcctcagccgatggtgcgctggcccacggtgacctgggcggcctgcaccacgtcggtgatggtgaccttgccgtcaccgttgatatcggccgccttggcgtaggcgccggacaggctgccggagcccaccacggacttctgcagcttgaccacgtcggtgatggtgatcttgccgtcgccgctgacgtcgccggtgaccacgatggtcacggtggcggagctgctgacagcggtcataccggtacccacgaggccggaggtcaccttggtgctgccgctatagatggtgtagcccgcgctgttcattgcggagacagacgtgctgggcgatacgccggtcagatagttgccggagggcttgggcgtctcgccgccggtactcccaccggtactcccaccggtgctaccgccggtgccgccgctgttggccgtcttggtaaacacggcggtgtaggtgacgtcggcgtcgggcatgacggtgccgctggtatagcgcttgccgctggcatccgcccaataatcgaagctgtacacgtacttgctgtcagcctgcatgaccggattcgttgcaggcagcgtgataatgtcgttctgggccagcttgtaggaatcccacacagcgccctgggacatgaacttcacggtgtgcagcgtaccgaacttggccgtaacggtgtggttcttgggtgccacaggcgtgctctgggatatctcgcggtcattgtagaaccagccctggaagcccttttcgttcacctcaggcagcgcgccgtagggttgtgcctctttataggtgcgcgtttccaaggtcttaccgttgaccacgaaggtcaccgtgtaggtgttgttgggggcttcgggcgtggtagtcgtggccgcgcccacagtgaaggtggtatccagcagcgtcacggtgctgccgctatcggtggtgccggtaatggtaaggtagtatttcccggcggagagcttactgaacttcagggtctcatccagttcccacaggtcgaaccacttggcattgatgccgctgcggctggcgtaggtaggctctgtcccggtagctatgttggtgaccaccgcttttacggtgctgatgttttgggtgcaggtgacgataccgcgcagggggaaggaggagttgccctgggtcaggttgtggacgatgctcttgccggtttcgtccttctccgccttctggggatagaacagaccgatggtgctccaggcgtcctgtccggccgcgggcttcatggtcacaacagcggcggtcttgctctccttgctcaaaccgaccttataggcggtgacagtggtggtggggttgttcttcagatcctcgtcgaccatctcccccacgacttccaccgtaatatcctcaagtgacttgccggtaagcacctccacaagaagcaggatttcctcctctgtaaaggatacgttttcgtcatcactgcttagctttttgataagggcatttatatcctcgtccttcatgccctcgctggcaagcttatcctttatctcctcggtatagtcctcctccgacttgccttcgatgctcgcctcgaacaaatcattcagttttgtctccagccgagtaccaaagtcgttcgccaactcgctggtatactggccattctcggtaatgcccttactgatctcgaccagcttcgcggcaatcaggtcatccctgttctggccgtccgctgtgacatccgcactggtcaccgtcacggtcacatactgcttggtgcccacgttgtacagtatgtagccgttgttgctgccggtcagtgtccagaactgtctgctgtcggcggcagcgttttgcagcatcagtgcgccgtcaacgaccgccagacgcttgccatccgtggtggccagggtgtatttgtcggaattgtagtaggtcaggatcagctgagaggccttctcctcggccaccaggtcggtgctgcctacgctgtagctgaaggtcctgccatcggagttatagcacagggtgtatttgccctccaggtgggaggtggtgttctgatagcgcatgaccagcgcatcggcaggctcgttgatgtgcaggcggctgtataccgaggactgcacatcgccgtccgctgcgctgtaataggccatggaacggttcttcacgccatagcggtcagacagctgggtctgcatatcccgatacttggggatatcctccgccagcttgctgcactcagtgtagatggcctcgatcagctccgcctcgctctgcatcttgaagccgcccagccggttgtcgatggcgcgggtgaccacgttataggcgccgtccacgccatgttggacgctgcggctccacaggacgttcttcagggcgatggagtagtcgttcaggttcagggaagggtatttgctttgcaggcggctgatcagggtcgagtagcgctcggtaccccagtactctgtctgggcgttggcaaactcacccttgttgacgccgtggcccagctccctccaggcactttcaaagttggggccgtagcctgctgcggctgcgccgctggtgttctcgccgtaggccttatccagcgtggccgcgaagccattgtatatagcattgccctggtagttccgcagccaggtgcggaacgcgtccagcgttcccgccttgctggagaacatatacaggccgaaggatgtaccgccggggtcgccgggtacggtggaaacagcgcccgggtcagcgtccgcgcccgtctcataatattggctcagtgcgcccaggtccttcaggctgctccagttcttactggcagccagcagtatggtggtcaaacagctcaccgccatcaccgccgccaggatcaatgccattccccgtttcgtcctcttcatgtcgatacaccctgccttatctctaagttgtatgggaagcgccggcggcgggaaggcccctccgccgatttacataacaatagtcatgtgtagtataccatcggtctgcgtcgttgtctaccaaaaaaacgagaaaaacacaaaaaatatgaaaattttgtcaccagcgccacaagatttgggtggatttatggcgcggaatggcgtataatggccgcaggctgacaaaaatacgcaaggagaaatcaatttatgtcaacgaatacgaaaaagaaacacggcaccggcgcggcggtggtactcatcgtgctgtgcctgctggcgctgggcgcgctgggatatatcatctggcggcagtttaatcccgtggtgccggagacggcggcgggctatgtggccgccgccgggaccaccgcccctgtgtatgacgaaaacgggactcagctgggttccctggtccgcggcgcggaggtacagtacgttgctgaggacgccgaggacggcgcggaccgcgtccgcgtggtcaacggcgagggctacgcctatctggacgcggccaacctgaccgcagactacaacggcgcggtgctgaccgatacggtgtacgccctgcggggcatgagcctgacggatgagacgggcgcggtccccggctgcgcggtggaaaagggcatggcgctgaccgtcaccggctttgacggcctggacgagaacggcgaggtcctgcgctgggccgtcagctgtgaccggggcgaggggtacatcgacggagagaacgtccgcatgacggaggaggaagcgctggcgcagtatgacgacgcgctctaccagcgccacgccgcgcggggcgacgcctggggcggcggcgacgcggccgacctggactactaccccacggagaagccggccttcacggacaatgtgatgcccgacgaggtgcgggccctgtacctgaacggcagcgccattcagtacgcggacagctatatccggctggcccagggtaccggcatcaacgcctttgtggtggacatcgtggacggcacggcggtgtcctacgcctccccggtgatgcagcagtacagcccgtccgcctacgctgcggcccaggacaccatggagggcttcaaggccaacgtgcagaagctccgcgacgccggctactacgtcatcggccgcatcacggtgttcaacgacgcccacctggccgccgaccacccggagtacgtcatctccgacctgaacggcacgcccctgaagatcagctccatgtactggcccagcgcctacaaccgcaccgtgtggcagtacaaggtggagctggctctggaggccgccgctctgggcttcaacgagatccagtttgactacatccgcttccccgacggcgcgtataagtacgagcaggccggtaccatcgactacaagaacacctatggtgagagtaaggcccaggcggtccagcggttcctgatctacgccgcgcagcggctgcatgacgccgggtactacatctccggcgatgtgttcggcgaatgcgccaacgcctacgtcaccgcctgcggccagtactggccggccatcagctccgtggtggacgccatctccggtatgccctacccggaccattacagcgcgcagggtgactataagccctgggagcacccctacaccaccgtccataacttcggcgagagcgccatggcccgccagagcgagacggcctcccccggcgcggtacgcacatggatacagtgctacaacgccatccgcgagccgtataaccactacggcgcggcggagctggccgacgaggtccgggccctccgcgacgccgggtgcaccggcggctttatgacctggaacggcgcgtccgacatcgacaaatacgccgaggtcatctccgccctgagctgatatgaacgcaaaaaagaaagcccgcacgggctttcttttttgcttattgcgcttccatggctttctgggcaaagctgttgtccaccagcttgtcgaaatccacccactggtccttctccagctcgccggcctcggtcatcaccgtctccagccgttccagcgccgaccgcgccatcatcggccccgcgttccaggcatcgatctgccggtgccgggcggtaacggcctccagggtatccaggtccgtatccgggaactgatcgatgatggcctccgccacctcccggtctgtgtggtccacgatccactgctgcgcccgcgcgatggcgttggcaaagccctgaatgacctccggatgcgccgtcatatagctctggctggcgaaataggcggtgtaggggatctccccggactcctcgccgatggagcagaggatatacccgtgtccggcgcgctctacctccgtggcggtgggctcaaacagcgtcacatagtccccctgcccgccggtgaaggccccggccatcatgttgaactgcaccgaggtgtccaccaccgcgtcctcctggggtacgatgccgtgctgcttgaggacgtattccagcgtcatctccggcacgccgcccttgcgcccgccgatgatggtcttgcccttcaggtcgttccagtcgaaggcctcatcactgcggcccaccaggaacgagccgtcccgcttggtcagctgggcgaagatcaccggcagatcatccttgccctgcgcgtggatatagatgcagctctccggcccggccaggccgatgtccgcgccgccggataccacggcggtcatcaccttgtcggccccgccgccgttgctcagctcgatgtccagcccctcatcggcgaagaacccctggctcatagccacgtactgcggcgcgtagaacaccgagtgcgttacctcgctgagccggaccgtgacatttttcgcctccgtgccggcggtatctccggtatcggtccccgcgccgcagccggtcagcaggctgagcgacagcagcgcggccatacaaatgcagataagttgttttttcatgcacgtaccccccatagatgatttaagaatgcttccgcccgcagcaccagcaggtacattcccaccgccgccagccccagcaccagcacgctggccatgaccaggtccatgttgaatacctgggagccgtagacgatgagataccccagcccggcccgggataccaggaactcgcccatgatgacgcccacccagctgagtcccacgttcaccttcagtgtggaaaacagcgtgggacagttagccgggaacaccagcagccacaggatctggcgcttgtcagcgcccagcgtccgcatcagccgcaacttctccgggtcggtggtgcggaagccggtgtacatactcaggatggtgacgatgagtgaaatggccagcgtcatggtgacgatggcccccatgcccgcgcccatccacacgatgaagatgggccccagggctgttttcggcagtgcgttcagcaccaccaggtacgggtccagaatgcgggcggcggtgtccgaccaccacatggccacggcgacggccgtgcccagcaccgtcccggcggtaaagcccagcaccgtctcaccgatggacaccgccgcgtggtgccacagctcgccggaggcgcacagccgccacagggtctgcaccatgcggctgggactgctgaccagaaagccgtcggacagccccagccggcagctgagctcccacacggcaaacagccccgccaccagcgcgatctgccagatacgcacccggcgcttttcgcggcgcacggtcctcaggtacgccgcacggcggggcgaaggcgttttctcaggcatgaacgtccagctccttccatatggcgttgaagtaccggtgaaattccggcgtgtcccggcgctccagcggcggcagaccacgcagcgcacccatgtccatctccgccttcaccacggcggggcggcgggacagcaccaccacccggtcggacatactcaccgcctcagcgatgtcatgggtgaccagcagggccgttttgccctcctgccgcaatatgcgccagatatccgccgataccgccagccgtgtctggtagtccagggcggaaaagggctcatccagcagcaatatctccggctcagtggccagggtccggatcagggcgcagcgctggcgcataccgccggagagctggcagggccgctttttggcaaaggacgccagcccgtagcgctccagcagccgggatacgtgtgcataggccgccgggtccttctcgccacggaccgtcagccccagcgtcacgttgtcccatatattccgccactcgaaaagctggtcccgctggggcataaagccgatttttggcgatgtgccctgtaccgcccggccgtcgatctcgatagcgccgccgctgaggggctccagaccggcaatggcgctgagcagggtggatttgccgcagccggagggccccactaaactgacgaacgcgccctcctccaccgtgaaggacacgtcccgcaccgcctccacctcgccgtccggggcttgatagcaggcggcggcatgacggagcgtaatgctcatatcctatgtgacctcctgtcgggaatgatgggagacttctctccgtggtcattctacgcaggagggacccgcggggtgccctacggcagcagatacggtgccagcagcgccgccagtcctgctgacagcgccgcctgcaccgccttggccggcacatacagccgcagggagatgccgctgcccgccgtcaccgccgccgtctggcagtggacgctgagcccgccccagcccagcagcgcagccgcggtgacgaagccccggcggtccggtgtcaggcgcaggatgccgttggtcagctccagcacccccgccgccagcggcggcaggggaccgatgagcccctccgccagacgcagcagcaccagaaagaataccacgaacccgcacacccgggccatggcggacaccgccccctccaccgcccggagaaactgccccgtcagtccggcccgcggtggcacaggccgtttcggcatggcggtgacgggcaacgggcggcggcagaagagcagacccgtcagcagcgcggcggcgcagtgcagcagatatagccaggctcccgtccgggcgctgccgaataccgacaccccggccacgccgatggcaaaggccgggccggcattgttgcaaaacgtcagcagccgcgccccctcggcaggggacagctcgccccggcgcaccagctccgccgccgtccgcgcccccacaggatagccgcccaccagccccagcagcagggcggcgcaccccgcgccgccgcagcagaagagccgcccgaaggggtgggccagcgcccggcccgccgcctccgccgcccccagcgccaccagcagggacgagacggcaaaaaacgggaacagcgccggtatcaccgatgtcagacacagctgtacgccgtcccgcgccgcctgggccgccgtctccgcctgccgcagcagcagtatcgccagcgtcccgctgcccagcagtgccaacatgcgctttatcatcaccatcaccggtccccagcctatgcgcgccgccgccgggaaataccccgccccggacaggcaagttccggtgcgtccgcgcatagcgttctgtatcatccgcagggaggtgacggtgtggcgggactgaaaaagaagctggcccaggtgggtcaggaggcgctggagcgcctggagctgccggtgaacatcgccgccggcgtggcccggatcgagctgctgggcaaccgggagctgtatatggaccggcaccgtggcgtgctggcctacaccaccgaggcggtggacgtcaacgggggcggcgtggtggtccgcgtccggggccaggacctgcagctgctggtgatgacggagcaggagctgcggatcaccggaaaaatatccggcatcgaactggtggagtaaggggggcgccgtgtaccgtaaagcagtgaattatctccgcggtcaggcggtggctgaggtggtctgtaccgcgccggagcgcgtggtgaacctgtgcgccgcccacggcattcctttctgggacctgacttggctgacggagacatccttccgcgtgaccaccaccctgtccggcgcgcggcgcctggccgaggtgacggcggacatcggcgcacaggtgaccgtgtgccgaaagtccggcgcgccggagctgtggcggcggtgcaggcaccggtatgtgctgctggcggcggtgctggtgctgccgctgctgctggcggtgggcagcgccttcatctgggacttcgaggtcacgggcaacgacaccgtccccacggaaagcgtattgcaggcactggaacgatgcggcgtgcgcgtgggcacgcgtggtgtgggcctggaccaggacgagctgcggaaccgggtgctgccgcttctgccggacgtggtgtatctggcggtgaacgtcaggggctgcaccgcccatgtgcaggtggtggagcgcgtccgcccgccgcatctctaccgggacagcgacgtgcagaacatcgtggcggccagagacgggctcatcacgaagatcgaggcgctggacggggtgacctgcgcggcggtgggcgaaacggtgcaggcggggcaggtgctgctgtccggggtggctgactcgccccggggctgccggtatatgcgggccaccgggcggatctgggcccggacatggtacgagtggacggtgcccgtacctctggagacggtgctgaaggacggcacggagcccgtgaagacccgcacccataccgcgctggaccttggacggaagcgaattgcgctgcctgcgggggacagcatattgcagggccgggaaaactgtgataaaataatacgataccgcggcgtgcagcttcccttcgggctgcgtctgccggtaacgctggtaacagagacggtggccgagcgcgcggtgtacgacggtgaacgtccggaggatgaggcctacgccgagggacagaagcagctggaggcccagttggcgcagaccatcggagacgatggccgtgttctgaaagcggatgtatccgcccggcggcagggcgcgtaccttatggtgacgctgcgggcggagtgcgaggaacagatcggcgtggacgcgccgctgactataacaagcgatacagggaggtaaacccaaaacatggaacaacgtatcggtattgaacgcatggaggaggccgtcaatcttttcggctccttcgacgagaatatccggcttctggaggcggaatttcaggtgcaggcggtgaaccggggcggcgagatcgtcgtgtccggcgagccggaaaacgtgatgctggcggtgaaggcggtgcaggcgctgctgaccctgtccaataagggcgagacgatcaccgaccagcacgtgcgctacgtcatcgggctggtgcgctccggtcaggccgagcgcatcagcgagctgacccaggatgtgatctgcatcaccagcaagggccggcccgtcaagcccaagaccatcggccagaaggagtacgtcaacgccatcctgaagcagaccgtcaccatcggcgtgggccctgccggcaccggcaagacgtacctggcagtggcggcggcggtggccgccttccgggacaagcaggtgaaccgcatcatcctcacccgtccggcggtggaggccggcgaacggctgggcttcctgcccggcgacctgcagtcgaaggtggatccctatctgcgcccgctgtacgacgccctgttcgatatgctgggggcggagacataccagaagtatctggagcgcggcaacatcgaggtggcgcccctagcctatatgcgcgggcggacgctggacgacagctttatcattctggacgaggcccagaacaccagccgcgagcagatgaagatgtttctcacccgcatgggcttcggctccaaggtggtcatcaccggcgacgtgacccagatcgacctgcccgccgacaaggtcagcggcctgaaggaggccatgaaggtgctgcgggacgtggagggcgtggccatatgcaggctcaccaaggaggacgtggtgcgccatgtgatggtgcagcgtatcatcgaggcctacgccaaatttgaggagaaaaagaaatgaaacgacactatatcccggtgaccgccgatgtccccggtgtcagcgagggcacacgcagctttctccgcagggtcatccgcacagcgctggccgagcaaggggtggacttcccctgcgaggtggatgtgctggtgaccggcgacgcgggcatccacgccatcaacctggagatgcgtggggtggaccgccctacggacgtgctgagttttccggagtttgaactgactcccggcgagctgcccggcgcggaggacgccgaccccggcaccggctatgtgcctctgggggacatggtcatttctctggagcgcgtgaaggcgcaggcgaaggaatacggccacgccaaccgccgggagttggcctatctggcggtacactccgtgctgcacctgctgggctacgaccacctggacgagggccccatgaaggcccagatgcgcgaaagagaagaggccatcatgtccgtgctgggcctggaacgaaaataacgctgcacgaaaattgctcaaacgaaagaaagttgaggatcacctatgaacatcacaaaaaccgcaatgatcaccgtgtgcggacagcccaatgtgggcaagtccagcctgaccaacgccctggtgggcgagaagatcgccattgtttcggacaagccccagaccacccgcaaccgcatttacggcgtggtgaaccggggcgatacccagtatgtgctgctggatacgccgggcctgcacaagccccgttcccggctgggggactatatggtcaaggtggtgcgggagagcctcagcgacgtggagtgcgcgctgctgctggtggagcccatcccccatgtgggcgagccggagaaggtccttttgcagcgtatccgggaggagcacctgccctgcgtgctgtgcatcaacaagatcgacacggtagagaaaaaggaggccctgctggaggtcatcgcggcgtacagcgcggcctatgacggctttgatgccatcattcccatctccgcccggaccggcgacggcttggatgagctgatgcggcagctgtcccaatacgcccaggagggtccccagctgttccccgacggcatgaccaccgaccaggcggacagccaggtgtgcgcggagatcgtccgggagaagatgctgcgctgccttgacaaggagatcccccacggcacggcggtggaggtgacgaagttctccgaacgggaggacacgggcatcatcgatctggatgtgaccatctattgcgaaaaggccagccacaagggcatcatcatcggcagaggcggcgaaatgctcaagcgcatcagctccgcggcccgtcgggatatcgagaaattcatgggcacgaaggtgtacatggagacgtgggtgaaggtcaaggaaaattggagagataatccgaatttcatcagaagtcagggctacaacgaggaataacatcaacaaatttccagccataaaaccggcgaaagctcccatgctaacgacatggaggtgttcgcgtggactactgggaattatttttggacaccggcgcgccggaggcgtatctgctgtaccgcggggcccaggaggctgtatgcaaagtggaaagaccgtgaccggcggcgtggtgctgcgggtcacagacacaaaggagacagatcggatattgacggtgctgacggcggaccgggggaagatacccctgatcgcccggggtgcgcggcgaaagaacagccgcctggcggcggcctgccagatgccggcctattccgagctgaccattttcaagcggggcagctggtatatgctggatgaggcgtcgcccatcgagctgttcgacgggctgggccgggacatcgagctgctggcgctggcggcgtggttctgtgagctgacggaggcggtgtgcgccgaggagacgccctgccctgagatactgtcgctgctgctgaacgccctgtacgccctgtgccgcacggggaaggacccgcggctggtgaaggcggcgttccagttccggctgatggcgctctcgggctttgagccgctggcggaggaatgcgccgtgtgcggaacggcacagccggagggaccggtgctggacatctccggcggatttgtggcgtgcggaacgtgcaggggcccggagcgcagcttccggctgccgctgaccgaggctggtctggcggcgctgcggcacgtgctgtacgcggaccccaggcggctgtacagctttacgctggagccgggcgccctgcaggcgctggatcaggcgggtgaggcgtttatcgccgcccagctggagcgcgggttccggacgctggactattacaaggccctgttgggataacaggaggacatacatacatgagcgagttatttgagaaatctatccgcacactggagctgccggcggtgctggagctgctggcgcgccatgcggtcagcgacgaggccaaggcccggtgcctgcggctgcgtcctgccacagacgcggcggcggtggagcacctgctggatgagacggacgcggccaagacgcggctgggcctgcacggcagtccgtcctttgcgggcgtgaaggacgtatcccaggcactggaccgggcggaccacggcggcgtgctgaacacccgggagctgctggatgtggccggtgtgctgaccgctgcgcggcgggtcagcgactatgacgcggagcgtcagggggaggccacggccatcgaccggctattctctgccctccatgtgaaccgctatctggaggataaaatacgcggcgccatactggacgaagagaccattgccgacaccgccagcccggagctggcggacatacggcggaatatgcgcgctgcggccagcaagggacggcagatcctgcagcggatcatctcgtcgccctcctacgccaaggtgctgcaggaggcgctgatcacccagcgggacgggcggttcgtggtgccggtaaaggcggagtgcaagggcagtctgccgggtctggtacacgacatctcatcctccggggccacgctgttcgtggagcccatgggcgtggtgcaggccaataatgaattgaaggaattgcaggcccgtgaggaaaaggagatcgaccgggtgctgcgtatactgtccggcgagtgcgcggcgcagcgggagaacatcctgtacgactacgacctgctggtgcagctggataccattttcgcccgggcacagctgagctatgccatggacgcggggcgtccgctggtgcggaagcggggcggcatcgacctgaagcgggcacggcatcccctgctggatccggccaaggcggtgccggtgacggtggcgctgggcggagcgtatgacacgctggtcatcaccggccccaacaccggcggcaagaccgtcacgctgaaaaccctggggctgctgtgcctgatggcccagtgcggcctgcacatccccgccggagaccagagcgccgtgcaggtgttcgaccgggtactggcggacgtgggcgacgagcagagcatcgagcagagcctgtccacgttttcggcgcacatggccaacacggtggagatactgaagctggcggatgagaagagcctgatcctgttcgacgagctgggggcgggcaccgacccggtggagggcgcggcgctggccatcgccatcatccaggacgtgcggcgcaagggcgcgctgacggcggccaccacccattacgcggagctgaagacctttgccatgaccacggcgggggtggagaacgccagctgtgagttcgatgtgcagacgctgcggcctacctaccggctgctcatcggcataccgggcaagtccaacgcctttgccatctcccggcggctggggctggacgagagcgtcatcgaggacgccaaggcccagatggacagtgaatccgtgcggttcgaggatgtgctgacccaactggaggagaagcgccagcggctggagaaggcccagggcgaggcggatcggctgtggcgccagcgtgaggaggacgcgcggaaggcgcggaccttccgtgagcagatggagaaggccaaggacaacgcccggaccaagggcgaggccgaggcgcggcgcatcgtgcagcaggcccagcggcaggcggaccaggtgttcgccgagctggacgagctgcggaaacagcagcagcggtcggactatcaggccgtgaatgaccggaaaagcgatatacgccgccgcctgaacgaggcggagacggcgctgcaccaacgggacgaggacacagagccggtgcccgcgcccagccggcccatcgccgtgggcgacacggtggagctggccggtgtgcgtaccggcgccgcggtgctggcggtcaacggcgacggcacgctgctcctgcaggcgggcaagatgaagatgaccgtgaaggccgcgcaggtgcgcctgctggaaacggcggaggagatcgagaagaagaaaaagcagtccgccgccgcgcagcagcgcagcggaccggcggtgtccatcaacaccggggcgcgggcgtccgccgagctggacatccggggcctggagacgctggaggccgaaagcgtggtggagaactacctggacgcggcatcccggtccaagctgggcaccgtgaccatcatccacggcaagggcaccggcgcgctgcgcgccgccgtgcaccagctgctgaagaaaaacaaacaggtcaagtccttccgcctgggccgatacggcgagggcgaggccggcgtgaccgtggtagagctgaaatgaacaacaccctcctgcgccggcaggagggtgctgctttttcagcgggagataaaaagggccggccgagccggtcccttttatgtatcacagctgcttgatgaagcagcggcggcgcttatgctgttcggtctgaaaatccttccactgggactggaccttgtcgttcagctccagcatggggccggtctcggcctgcttgatgcccagcttgtggcagcctttcatggccttgctgaggataatggcgttgacaccctttttctggtagtccgggtggacggcgatgagcagcaggtccacggtgtcgttcctgtggaaggccttgagaacgtcgatccagccggtgggcatgaggcggccccggtgcttctgcagggcagaggccaggcttggcgcacctacgccgaaggccaccatgcggtcgttttcatccatgacgaagcaggtggtgttgggattgatgaggggcgcgaacttggcggagtactttttgatctggcggtcagagagctccacagtgccgtacagcggcgcgtaggccaggttgaccagctcgaaaaacggcttgagcaggggcagataggacaggcggctcctggcctcgtgaatgtgcaggcggtggcgcttgagaacgaagtcggagatcttctcccagcgctgtatggtggcctcgtcctccgggacggtgataagctcctcgatccagtccacgtccttcacatagcccagggcggccatgtggtcgatgtagtagggatggttatagtatgtgaaaaagcagctgcggcggtcaaagccctccaccagcataccctcgcggtccatgtcggtgaagccgaggggaccgtgaacggcggtgcagtccagctccttcgcccaggcctccaccgtgcggaacagggcggaggagacctccgggtcgtcaatgaaatccacctgggtaaagcgcaggcggttggcaccccacttgtcgttggccttgcgggagtggatggcaccgatgcggcccacgatctccccgtcgcgcatggccagccagcaacgggcgtcgcagtattcaaaggcggggttcttgctgcggtcccaatcggagagatcgtcgccataggtggcggggacgaactgaggcacatccttatacagctcgtttgggtagtccacgaaccggcgcagctgggctttgtcagttacttctataatggagaccatttagtatacctcctgtatcatgcaaacacacatatagtgtacgacattatttcacaaaaagcaaggatagtgacattaagaacacattaactttaccccaatgttacccactgcaaaaaatcagaaaaaacgtttgacaaaccggacaggcaggtgtacaatacagttgagcacgaatagagtcacccccctctgtccgtgccacccccctgtcgggtattcccccttttacccgacaacacaccaccacagggagcgctacggcgctccttgtggccgtcttggggagggagaaagagcagccgaaaggctgctctttcttcatttccgggggaatatctgccccatgccgccgggcaaacggcgcggagacagcagagagcagcggcgccggaacatcgttccggcgccgctgcttattgccggcatttcaagcgcggagagagtgccctgcttcagttcagagtgccgtccttttgccggaacagggcctgtacccggcggcggagcacggcatgctccggccgggtcagcagcgggtcgccggccagcagctgctgcgcggcatcccgggcctcggccagcaggggcatatcgcagctgaggtcggcagccttcagcgtgggcaggccgtgctggcggctgccgaagaagtcgccggggccccggagcttcaggtcctcctcggcgatgcggaagccgtcgttcgtctgggtcagggctttcagccgccgtttcgtgtcgtcattctgcacgtcgctgagcagaacacagtagctcttggcctggccgcggcccacccggccgcgcagctggtgcagctggctcaggccgaagcggtcggcgttctccaccaccatcagtgtggcgttgggcacatccacgcccacctccaccacggtggtggagaccaagatatcgctctccccggcggcgaaggcggccatgaccttttccttctcctttggcttcatacggccgtggagcacggctatccgcagctcggggaaggtatcctcctgcagtgccttggcgtaggccgtcacggccttgcgctcgtcgggcagagcgtcatcctcgcccaccagcgggcagacgatgaacacctgatggccctcctgcacctgcttgcggataaagccgttgagccgcgcccggtatttctcgcccagagcgaaggtctccactgtctgccgtcccggcggcagctcgtcgatcacagacacatccagatcgccgtagatgataagggccaacgtccggggaatcggggtggcggacagcaccaacgtgtgcggggcggcgctcttgtgggacagggcagagcgctgttctacgccgaagcgatgctgttcatcggtgatcaccagacccaggcgcgtatactgcacgtccgccgtcagcagggcgtgtgtaccgatgcacagtgtgatatccccgctttgcaggccggccagaatggcgcggcgttccctgacgggggtggagccggtgagcagagcgcacggcaggccgaagcgggcgaacagcggggccagattttcgtaatgctggcgtgccagtatttccgtgggggccatcagggccgactgccagccgctttgggcggcgaaccacacgcaggcggcggccaccatggtcttgccgctgcccacatcgccctggcacaggcggttcatgggccggccggaggtcatatcgcctacggcgtccgcaatagcccgccgctgggcggcggtgagggcaaagggcagggcggcatagaagggcgccatgtccgccgcttgacagggcaggccggccaccgtctcccgccgctgccgcagcagagacagaccgcagctcagaaggaacagctcctcaaataccagacgccgccgcgcggtatccagcgcctcctccgaggcggggaagtggatattctcgtaggcaaacccggcatagcacagatggtgtgcctgccggattccgtccggcagcacatcttccggcaggtcgcggcactggtccagcccctggcgtacggccttggccaccatagtctgtgtcagccccgccgtcaggggataaatgggcatgatgcggccggtgagcagctgcttcccctccgtctccagcaggggattgaccatgcggcggcgcacaccgccgccctcgaccttgccgtagaagatgtaggtctctcccggatgcaggacatttttgcggtattcctggtggaagaaggatacatccagcacgccgccctcgtccacagcccgtacctgcaccagcgtctgaccaccgcggatacgggcggtagtggggggctgggcgatcatggccttgcagcaggcgtactccccctccggtaggtcccggatagggtagagctgcgaacggtcttcccatcggcggggatagtaggcgatcaggtcgcccagggtgaaaacgcccagcttttcaaaagccttggcccgggcctcgcccacgcctttgatatagcggatatcggtattgagatcggccatgggtgcccctcctttgcggttttgtacattgtaccacagccgcacggcaaagacaaacgaaaaaccggggcgacagcgccgtcccggtttcgtatctcattcgtgctcggccagatagcgggccacatacacgccgctggcgctggcgtgggacagggagtgggtgacgccgctgccatcgccgatgacgaacaggcccttgtgcggcgtttccagatttctatccagtgccacctccatgttgtagaacttcacctccacgccgtagagcagcgtgtcgtcgctggcggtgccgggggcgatcttgtccagggcgtagagcatttcgatgatgccgtccaggatacgcttgggcatcaccaggctcaaatcgccgggtgtggcggccagcgtgggggtcatgaagcccttttcgatgcgcttgggggtgctgcgctggccgcggatcaggtcgccgaaccgctggaccatcacgccgccgcccagcatattgctcaggcgcgcgatgctctcgccgtagccgttgctgtcccggaacggctcggtgaagtgtttggataccagcagggcgaagttggtgttctccgtgtgcatggcggggtcctcatagctgtggccgttgacggtgacgatgccgttggtgttctcgttgaccaccgcgcctctggggttcatgcagaacgtgcgtaccttatcctggtatttctcggtcttatagacgatcttgctctcatagagctcatcggtgatgggggcaaacacctcggcgggcagctccacccgcacgccgatatccacacggttggacttggtggggatatccagcgattggcagacggactccatccacttgctgccgctgcgtcccacagagatgatgcacttgtgtcccgtgaacacgcccttgtccgtttcggcctcgtaggcgccatcttcggtgatggacagcgcctttaccggggtgaggaagtggaagtccacatggtccttcagcttggcgtacaggttctcgaggaccttatagttgatgtccgtgcccaggtgccgcacggaggcgtccagcaggtgcagattgttttgcaggcacaagcgcttgaagccgctgtcggcggtggagtagagcttcgtccccgcgccgccgcaggccacgttgatatcgtccacgtagtgcatcagctccatggccttctgcttgccgatgtattcgtacagtgtgcctccgaactcgttggtcaggttatatttgccgtcggaaaatgcgccggcgccgccgaagccgttcataatggcgcaggtcttgcagtggatgcaggacttcaccttgtcgccgtcgatgggacagtgccgcttttccagcgggttgccagcctccagtacggctaccttccactccggcctgcgctgcatcaattcataggcggaaaaaataccgccggggccggcgccgataatgatcacatcataagtcatggagatacctccttatgttttatccgcagaatattataacaaggaaacggaaacttgcaacccgcaatttcttatggcaggcatatcaaaatgtaatttcacttttcttatcgtaaagcgctggtgtttcggtttatcctgtgctacaatagaaaaaatcacacaggaggacgccgccatgagctacgcagaccgcatattcaaggaaaactgccgggagatccttacccacggcgtatgggataccgaccagaacgtgcgtccccactgggaggacggcacgcccgcccacaccgtcaaaaaattcggcatcgtaaatcgttacaacctgcgccaggagttccccatcctcaccatccgccgaacgtacttcaagacctgtatcgacgagctgctgtggatatggcagcagaagtccaacaacatccatgatctccgcgggcatatctgggacagctgggccgatgagaacggctccatcggcaaggcctacggctatcagctggcggtgaagcatcagtatcccgagggggagatggaccaggtggaccgggtgctgtacgacctgaagcacaacccggccagccgccgcatcctgacgaatatctacaattttcaggatctgcacgagatggcactgtacccctgcgcctactccatgaccttcaacgtctccggccatacgctgaacgctatcctgaaccagcgcagccaggatatgctggcggcaaacaactggaacgtggtgcagtacgctgtgctggtgcacatgatggcgcaggtgtctgggctgcaagcgggcgagcttgtccatgttatcgccgacgctcatatctacgaccgccatgtgcccatcatcgaaaagctgctggagaaggacgagcgtcccgcgcctaagttcagcatcgatacgtccgtgacggatttctatcagttcacccgcgacagcttctcgttggaggggtacgacccccagcccttcgaggacaagatccctgtggccatttaaggagggaacgccatgtatgccatcgtcgccgtggatgagaagtggggaatcggcagggacaacgccctgctgttcaacctgcccgccgacctcaagcggttcaaggagttgacctccgggcatacggtcctcatgggccgcaaaacgctggagtccctacccggcgggaggggcctgccgaaccggcgcaatattgtcctgaccgggcagcggggcttcacggcagaacgggccgagatcgtccactctccggcggaggcactgctgactgccgatgaggacagctgggtcattggcggcgagagcgtctatcggatgttcctgccgctgtgcgatcgggtctatatgacacgaattgccgccgatggcagcgcggacgccttcttccctgatctggagcacgatcccgggtggagactggacaagcgctcggcggatatggaggaaaacggcctgcggtttcgttatgaggagtatgttccggtaaaaggtgaataaaatgaccccccgataccgtcggggggtcattttattcttccatgtccacggtgatgttgtcggtgccgtgctgttcaaactcacctaagtacgtctccatccgggccatgatctcatcgtagttctccggcgtgatggggggatcgtccatgtcccgcagggccagctcctgggccagtatctcaaagaacgtggcgtcctcataggccatgatggcctcatggataccgccgtcggcaaaggcgcgggaggggatcagctctccctggtacaactccgtcaggggcgccatgccgtggtccaggcagtgggcaaacaccaggctctccacctggtcgtactccttgatgcggtcgtcgccacgggtggagttcagcacccagttgccgatatacaccagatccagcagacgccggaattgcttttccgtcatgttcagttccatcataccacctccatcacgggcagaaattcatttccacgattatagcacgttcccgcagggattgccacagaaaaaaatgaacaggtgcgccaatttttagcttgtaacgataggggaaacatagtacaatatatgagttaaactatgcactgccgccgcggcggcaggaaaaaggagggcgcatatggatcagcggcctatcggggtgttcgactccggctccggcggattgaccgccgtgcgggagatacgtagcatcctcccctctgagaacattatatacttcggcgacacgtcccgtgtgccctacggcgggcgctcggcggaaatattgctgcgctacgcccggcaggatgtacatttcctgcggagctttgatgtgaaagcgctgctggtggcctgcggcaccgtatctaccaacgctctgccggtgctggcggccgagaacgatatccccgttctcggtgtggtgaagccctcctgcgcggcggccgccgcggcgacccgaaataagcgggtgggcctgatcgccacggcggcatccgtgcgctccggggcctatgagcgctgtctggcggcgctggacggcgccattcaggtgtatgtcaaggcctgccctctgtttgtgccgctggtggagaacgggcgcttccgccccggtgatccggtcatcgagacggtggcccgggagtatctggagccgctgcgtgccacggggatcgacaccctcatcctgggctgcacccactatccgctgctgacggagatcatcgcggacattatgggccctggcgtgacgctcatcgactccggcgctgcggcggcgcgggtcctgcggcagacgttgtcagaccggggtgcgctggcccaacgtgaccacggcacactgacactgtatgccagcgatcagccggaggacttcggtgcgctggcagggcagtttctgcggcggccgctggagagcgcggtacagcacgtggacattgagaggtactgacatggacaaggtacaggtactggtccgcagccgcagtgatttcgccggcggcgtggacgaattgaccttccggggcacagggacgctggaaaagaccgactatggctatcgcctgcgctatacggcgcagaacgaactggacggaagcgccgtggcctcggagatgcggctggagacgcagcagcgccgggccgttgtcatcaccgagtccaaggacggcggctacggtctgctgctggaccctcaacggcaaacggtcacgcagatcgccggcggcgacggcggtgcgctgacgctgcacgtggacacgaaggaggtgtcctggcacctgccccgaaagggcgatggccatatcacattgacgtatacactgctgctgggcacgcaggcgctgtccgccctgcacctggcactgactttgacaaaagaggagaaggacgcatgaatatgatcgaaagcgccaaggcgcaggtacggcagctgacagtggctgcatatggaaaggctgcggccgcagggctgctgcctgccggtatcaccgccgagccggcggtggagatccccaaggacaccgccaacggcgactataccaccaccttctgcctggcggcggccaaggccatgaagatgaacccccgtcaggtggcacagacccttatcgacaacatgacgctggagggcagctacttcacctccgtggagatcgccggccccggcttcatgaacttccgtctgggcgaaaagtggttcgccgacaccgtctccggcattgagacggcaggggagaagtacggcgagaacgacacgctggctggcaggaagtacatggtggagtttgtctccgccaatcccaccggccccatgcacatgggcaacgcccggggcggcgtgctgggagacactttggccagcgtgctgcaaaagtccggtgcggacgtgtggcgtgagttctacgtcaacgacgcgggcaaccagatcgaaaagttcgccaagagtctggaggcccggtacttccagatcatcaagggcgaggacgcggtggaattccccgaggacggctaccacggcgacgatatccgggagttggcccaggctttctacgagaatgagggcgataagtatctggactgcgacgaaaagacccgccatgacgccctggcccagttcggtctcagcgtcaatatccccaagatgaaggccgatctggcccggtacggcattcagtacgaccagtggttcttcgagtcttcccttcacgacagcggctatgtggctgacacagtgcaggcgctgacggacaggggctatacctatgagaaggacggcgcgctgtggctgaagacctccgatatcctggccgcccagctgcggcaggagggcaagagcgacgaggctatcgaaaagcttggcctgaaggacgacgtgctgcgccgcgccaacgggttctatacctacttcgctgccgatattgcctatcaccgcaacaaattcgccgtccgcggctttgacaaggttatcaacatctggggcgccgaccaccatggccatgtggcccggctgaagggtgctatggacgctctgggcctggatggccagcaccggttggacatcgtgctgatgcagctggtgaagctggtccgcgacggcgagaccgtccgtatgtccaagcgcaccggcaaggccatcagtctcaccgacctgctggacgagatccctgtggatgcctgccgctggtttttcaacgccaagccggagacgcagatggagttcgacctgggcctggccgtccgggaggacagcgagaacccggtctactatgttcagtatgcctacgcccgtatctgcacgctggtgaaggcgctggcggcggagggatataccgttcccgccgcggcggaggctgatctgtccgtcctgaccgccgacgaggagaaggccctcatcaagcagctggcccagtaccctgccgtggtgcagttggccgcccgggactacgatcccagcttcatcaaccgctatctggtggagctggctgccgcgttccacaaattctacaacgcctgccgcatcaagggcgaagcggagaacgtgctgctggcacggctgaagctggcggacaccgcccgcgccgtgctgaaaaacggcatgacgctcattggctgctctgcaccggagaagatgtaaactatgaaaaagccaccccgtgaggggtggctttttcacgtctcaaagaacagccggacggaccaggccgcggccaggtaggcagccaggtccgccgtcagggcggcgggaatggtgtagcgtgtccgcttgatccccgccgcgccgaaatagacggcgacggtgtagaacgtcgtctcggtgcagcccagcatcacggcggcgcagcgcccgatgtagctgtccggtccgtattggcgcatgatgtcgccgccggcggccaacgccccggagccggacagcgggcgtatcaccagcagcggggccgtctccggcggtacgcccagaacggtgagcgccggggcgagcagagccgtcagggcatccaatgcgccggaggcccgcagcatatacaccgccgtcagcagggcggccagcgccggcagaatggataccgctacctgcaggccactttttcctccagtgacaagggcgtcgtagacatccacgcgccgccgggtgccccacagagcggcgccggacagcagcagcggcagtatccaggcggaaaatggctccatctcatgtcctccacacccggcccagcacccgggcgcaggccaggcccgctgtcaccgacagcgccgaggacagccacaccgccggcaggatatccagcggcgcggcgctgcccaggccgccccgcagggcggccacggtggagggcagcagctgcaccgaggcggtgttcagcaccaccagccggcacagttcgtcgcttgcggtgccgccgcagcccaccgccatacgtttggcggcctgtatacccgccggcgtggcggcgttgcccagccccagcagattggcgctgacgttagcactgagggcagccagcgtctcctcgtcccgccctgcctggggcagcagacgccgcaggaccgggcgcagcaggcggctcagtcccgccgccatgccgctgcgccgcatcagctccagcacgccggaccacaggcacagtgccccagccatgaccagtaccagctccaccgcagcagcggcaccctccagtgccgccgctgtcaccgccgacagacggccgctgactgcaccgtacaccagggacaccgttaccatcagcgtccagaatatccccatcaccacaccgcgcacctccttacgggagaagtctacgcggcggtctgtgcggttatttgcaaaaattctcgacacgtttcgaattgttgttgacatgcttcgttgaatatgttaaagtacaggtataaaatttgcggggattttgttattactgcatagaggggggagaggacatgaaatctaccggtattgtccgccgcatcgacgagcttggccggatcgtggtcccgatcgaaatgcgccgcgcgctggatatcggcgagcgtgagacaatggagatcagcgtggagggcgacggcatcgtgctgcgccgcgtccatgtgggctgcgtgttctgcgacggcaacaaggatatatccgcgttccgcggcaagaatatctgcgccaagtgcaggcgcgagctgcaaaagacctgaaaacaagaaaaaacagtgccgcccactggggcggcactgtttttttcgtcttatgctttcagcgcggtatcgtacagggcgttgcggggcaggccggtgtcgtccgctacccgacgcacggcctctttcagcttcataccgccgtcccgcagggccagcacccgtgctgcgccctcttccagcgtcagggccggcaggttctgcttctcccggcccgctatcaccagaacgtactccccccgtggctcgttgtcccggtagaaatccgcggcctgggccagtgtggtgcggacagtgtcttcatggagctttgtcagctcacggcacagggcggcgggcctgtctcccagcagctccaccatgtcggcgagggtttgacgcaggcggtggggcgcctcgtgaaacaccatggtgcgcgcctcaccggtcagctcctccagggcagcgcggcgctcttttttaccggagggcagaaagccctcgaaggtgaagcgccgggtgtccagcccggacacggccagggcggcgatggcggcgcagcagccgggaatggcctgtaccgtcacgccgttttcggcgcacagggccaccagatcctgccccggatcgctgatggccggggtgccggcatcggtgaccagcgcgcacgtttcgccggagagcagacgttccaaaatggcctgacccgccgcagcgcggttgtgctcatggtagctgacaagcggttttttgatgtcaaaatggttcagcagcttcacgctgacgcgggtgtcctccgctgcgatgaagtctgcccgggccagcgtttctgcggcgcggggcgagaagtcgcccaggttgccgatgggcgtggccaccagatacaggatacctgccattgggaattaccccctgtccttgaaatagatgcggcgcagctcgccgctttcgccgccgtctgcttgtagcagcagcggcgtgtgcaccgccagtccggccccgccgtggcggcggcaggacagcagcaccagccgcggcggcgtctgtgcgtccttctgcacgaagcgcagcaccttcggctccagccggtggcggcgcaggacgtccatcagctccgccgtccgttccgcccggtggaccaggcagaaccgtccaccgctgcggagcagatacgctgccgcagcacacaactggtcaaaggtgcaggcggtttcggaccgggccgtgccccggcttccctccgccacccgtcctgtgtggggcgggaaatagggcggattggccacgcacaggtcgaaactcccggcttttggcagagctgtccgatcccgcaggtcggcccgcagcacggcaacgcggtcctccagaccattgacggcggcgttttcttccgccagcgcacaggcagcactgtcgatatcaatgttggtgatgtgcagttcctgctgccgcgccagcagcaggaggcccagcaggccgatcccggcgcccaggtcacagacgcgctcaccacgccgcacttcggcgaagtcccccagcaggaacgtgtcggtggagggcttgaacacgttgtcgtcaaagcggaagcgaaaaccgcccggccacagctcatcccagtgctccatgccgcttcctcctctgcacatagctgtactatccgttgacaaaggggtgtctgcccttatcggcggatgatatcatggtgacactgcgttgataccatgttgataccatgatgacaccattgtaatacaaaacccggggggatacaacaaaaaagtgaccggcggtgccggtcacttttcctcatcgttgtgcttggttcaattactcagcggggctgatagcgccgttgggacaggtgtcagcgcaggaaccgcagtccaggcaagcgccggcatcgatgacgtagcgatcatcaccctgagagatagcgcccacggggcaagcatcagcgcaagcgccgcagctcacgcaagcagaaccgatctgataagccatagtaagtacctccattaagattgtaaacacattgtaccatgaaaaatgaaaaaatcaaccccattttccgtggaaattcaaggtttttagttagcatacactaactcgcgaaatcccgggaaacgcccgttcatccgccggtgaccaccatgtacagcagtgccgctgtctcccgcgcccagtagccggcggtcaggaaccaggggctggcgcagccggcggaatacggtgtcagtccgctgcgctgcgcccagatggctgcgcggagctggtggaagttgtccgaggcgatggccacatccgtggacaggcccttctcccgcagcagcgcggcggagaaggccaggttctcttcggtggaggcggactggtcttccagcaggatacgctccggcgcgatacccatggacaccagcgtgtcacggatacattgggcctcgctgatgggttcgctgccgttctgcccgccggaggcgacgcacagggcgtccgggtgtgcggtcagatagtcataggccgcgttgatgcggccccgcagcatcaggctggggtgcccgtccgggaacacctggcagcccagcaccaccacggtgcagtcctgcccgtcggcgggccggtccgcggcggccatggccattttacccagcgttaccagaatggccgtcatacacacggcgatcacacagcccgccagcgcgcgaagccattttggccgcagcaagcggcggaagaagcccggccatgtgagccacgcggcgcacagcaatagcagcgccgccggccagaccatgccgaagtgcaggatacctatgcccagcggcagcaggaagaacactgccgccagcaggcagaggacagccaatatatgccgtaggacctttgccatgtcagttctccttgatatgtccggcgatgcgctgcatgatcatatccagcgccaccaggttgtgtccgccctccagcacgatgatgtccgcaaacttccgcgtgggctctacgaactgctcgtgcatgggcttcacggtggtcaggtactgatttaccacggactccagcgaccgtccgcgttcctccacgtcccgcagggcgcggcgcaggatacgcacgtcggcgtctgtttccacaaagatcttgatgtccaacaggtcacgcagcgccttgttctggaagatcaggatgccctccacgatgaccaccttggtgggcttgatctccaccgtctcgtcggtacggttgaggatggcgtagtcgtacacggggcagtggatggtctcgccccgcttcagcgccttcaggtcctcgatcatcaggtcggtgtcgaaggcgtcgggatggtcgtagttttgcaggcagcgctcggcgaagggcctgtcctgccgcttgtagtagttgtcgtggtgtaccacactgatgtcgctgccgaagcgtgcagccaggtgctcggtgagcgtggtcttgccgctgccggtgccgccggcgatgccgatgaaaatggtgttcatagttgcgcctccccgcatttctctggctctattataagaagcgcggccgggaaaagcaagtgccggcgtgaagtgttgtaaaaaaaggatgaatttcctcgaaatgcagttgacgggcggcacaaaaatgagtatgatatgtattatgtaaatccaatgcccggtatggaggttttctataatgagtctgatcaaatgccccaagtgcggagagatgttctccgatagctataagacctgccccttctgcgaggaggacgaggcctattacagtggtaagctgcggaagagccgtggccgccgcgccgccgagagccgccgccgcaaaacacccagcgtactggggccggtggccatcgttgtactgatcctactggcggcgctggtggtgtggctgatcttcggcgaccagatcaaggaggccatcaccggcgagaagccccccattaccgatgtggacaagcccgacgacaccatcgacaagcctgacaacacgcccgtcacgcccacgatctccctgaaccgcaccgttctggtgctgaatgtgggcgacaaggacgagctgaaggtcaacggtacggaggatgccgcggcctggagcagcagcgcgcccaccgtggccagcgtcaactccgccggtgaggtgacggctttgaccaagggcaacgcggtcattaccgccgaggtgaacggcgagtccgtcacctgcaccgtcaccgtcaaggaagagagcgacgcgccggataacggcaccgatacgcccgacaacaacagcacgaccaccaagcccaataacagcaacaagcccagcaccggcagcgtggacgtcagcaagctgacgctggagagcgaatacggcacgatcatcaagcccaacgacggcacgttcgacatatccctgccggtgggcctgagctgctccttcacggtgaagggcaccgacatgaccgccgcgtggagcagcgccgacagctccatcgccaccgtttccgccgacggcacggtaaagaccgtcagccgcggtgagactacactgaccattaagatcggcagcacggaagtcaagtgtttgctgcgcgtgaccaaatgatacacgaaaccgccgcccgaaagagcggcggttttttccatttgtttccgggatttagaatatctgataattgacggtttctctgtggaatgatacaatagaaagaacggaaaccgacggcggctgttccgccgcaaaatacaaagtgaaggagccgtgatgtatgtaccgtatcgtcaagaaagaagcgctcaagcccactgtgatcctctatgagatcgaggcacccatggtggccaaaaaggcagagccgggccagttcatcatcctgcgcgtggatgagaacggcgagcgtatccccatcactatccatgattatgaccgcgagaagggtaccgtgaccatcatcgtccagaccgtgggcgccaccaccgaaaagctgagccacaagcagcagggcgagtgtctgcacgactttgtgggtcccctgggcaagcccaccgagaccgagggcaagaagaaggtctgcgtggtcggcggtggcgtgggctgcgccatcgcgtatcctgtgctgaagaaatttcacgactgcggcgccgaggtccacgcggtggtcggcttcaagagcaaggacgtggtcattctggaggataagttcaaggcggtctcctccgtgctgaaggtctgcaccgacgatggctcctacggccgcaagggtctggtcaccgaggcgctgaaggagctgctggacgagggcaatgtgtacgatgagatcttcgccatcggccccatggtcatgatgaagttcgtctgcaagaccaccgcgccctacaatatgcccaccaccgtctccatgagccccatcatgatcgacggcaccggtatgtgcggcggctgccgcctgaccgtgggcggcgagacgaagttcgcctgcgtggacggccccgatttcgacggccagaaggtggactgggatctggcggtgaagcgcaaccagatgtaccacgacttcgaggtgcgtaagcacgaggaagtctgcaatctgttcaagcaggaggtaaagtaagatggctgctaagatcaatatgcgtttggacaagaacgaaatgccctcccaggaccccaatgtccgcaacaaaaacttcctggaggtggccctgggctacaccgaggagcaggcgctggacgaggcggcccgctgcctgaactgcaagaaccacccctgcgtggacggctgtcccgtcaacgtgcgtatccccgaattcatccagaagatcgtggagaaggactacgagggcgcctatcaggtcatccatcagaccagctccctgcccgccgtgtgcggccgcgtgtgtccccaggagagccagtgcgagatgcactgcgtccgcggcaagaagggcgaccccgtgggtatcggccggctggagcgctttgtggctgactggcacaacgcccacagcaccgaggccgcggcggtccccgcccccaacggccataaggtggctgtgatcggctccggccccgcaggtctgacctgcgccggcgacctggccaagaagggctatgaggtcacggtgttcgaggcgctgcatctggccggcggcgtgctggtgtacggcattcccgagttccgtctgcccaaggccatcgtccagaaggaagtggacggcctgaaggccatgggcgtcaaggtggagaccaacaccgtggtgggccgcaccatcaccattgacgagctgatggaggagtacggctttgaggccgtgttcatcggttccggcgcgggcctgcccatgttcatgaacatccccggcgagaacctgaagggcgtctattccgccaacgagttcctgacccgtatcaacctgatgaaggcctaccgcgaggacagcgacacccccatcatggacctgaagggcaagaccgtggccgtggtcggcggcggcaacgtggccatggacgccgcccgctgctccaagcgcctgggcgccgaggtgtacgtggtgtaccgccgcggcatggaggagctgcccgcccgtcacgaggaggtggagcacgccatcgaggagggcgtcatcttcaagacgctgaacaaccccgtccagatcaacggcgacgagcaggactgcgtcaagtccatgacctgcatcgagatggagctgggtgagccggatgcctccggccgccgccgtcccgtggagaagaagggcagcgagttcgacctgagcgtggacgcggtcatcatgtccctgggcaccagccccaacccgctgatcaagtccaccaccaagggtctggaggtcaacaagaagggcggcatcatcgtcaacgaggagggcctgacctcccgtcaggcggtgtatgccggcggcgacgccgtgaccggcgcggccaccgtcattctggccatgggtgccggcaagctgggcgcaaagtccatcgacgagtacctgagcaagtaagtacatcgaaaaggcccgctgcaaagcgggcctttttatgccggaaagcggtaaaattttacgttctccttatggaaagcgccgctgcgctgtggtatactgagagcagcaacagacgggaggggccattatgccgaaagactttatcgacttcaaccagaaaacaggctttatctgcgacatggacggcgtcatctaccacgggaaccggatcctgcccggcgtggcggacttcatccagtggctgcatgaggagaacaaggagtatctgttcctgaccaacaacagcggctacacgccccgtgagctgcagcagaagctggcccggatgggactggatgtgccggaggagcatttctataccagtgccctggccacggcggccttcctgaaggaccaggctcccggctgctctgtgttcgccatcggcgaggcggggctgctgaacgccctgtacgacgcgggccttaccatgaacgacgtgaacccggactacgtggtggtgggcgagggccgcacctactctctggatacgctgaccaaggcggtgaacctggtcatggccggcgccaagctcatcggcgccaactcagacgtgtccggccccatcgaaagcggcattgctccggcctgccgcgctctggtggcccccatcgagatggccaccggcaagcaggcctatttctgcggcaagcccaaccccctgatgatgcggaccggcctgcggctgctgcactgccactccgccgacgcggtgatggtgggcgaccgcatggacaccgacgttatctccggtctggaaagcggtatgtccacggtgctggtgctctccggtgtgtccacccgtcaaacggtggagacgtatgcctatcagcccaacgtcattctggacggtgtgggcgacatcgcccgtctggcccgtaaaaacaagaaataggcgctacggcccgagggccgggaatgaaaagaagtgaccgcggaagcggtcacttcttttcattcgttttgcaacagcagggtgtatgtctcgccagccacggcgaacacgcgctccacatcggtgtccatctgctccagcagcggccccgatgcctcgtagtccacgcaggtgccgcaggaggcgctgagcttgcggggcaccggcatcatccgggcccggacccccgcggccgtcaggcgctggcaggtcagcagagcggacagatgggtgtggaacgtggcgatgtagcggctcatttggacagggacagacggaagtcctgaccctccggcgccacggcgaccttgtagccgctgttttcggcgaagcgggtgacattctccacagagcactggttgtccaccagcacctccagggtggcgggggcatcggcctttacggccttctgcaccatcaccacgggcatggggcaggaataacctcttgcgtcaacagtcattgtgatgttcctcctttacttggcggcctcaacaggcgcgctgacagccttgggcatattccacagggacacacccagcatgatgaggatacccaggcacacggctaccttgccgttgttggacagaccgcccaccacgatctccttggcctcgttcatggcgtcggcgttgccggccagaccgaagttgtgggcaaaggccgcgcccacgatcatgccgaacacggtcacggcgctgtcaccgttgccctcgccggccaggatcagctgacgcagggggcagccgcccagcagtacgctgccccagcccaccaggaccatgcccagcaggttccacagctggctgctgtgggcgatgggctgcagttcaaagcccagcttgaagctgccggtgatgaggctgcccgccaggacgaccacgaagatggccacgaagccgtacagcagcttgaaatccttgaacagcatggcgtcgcggatgccgcccaccatgcacaggcgggcgcgctgggccagagcgcccaccaccacggcgatcagcagtgcagccagcatgggcgcgtgcttggagccggggccctcctcactgaacttgaacaggctgggcacggcgatgaccaaaatcagcaggccggtcatcacgatgggcagcacgccgccctcgcccttcccaacgggataggcccgcttcagggagaagccgcgcttgaggaactggatgccgatgaagatgcccagggtgaagcccaccaggcccaccacggcgttcaggtcgccgccgccgatacgcaggaccatccgcagggggcagcccaggaaggccagcgcgccgatcatgacgaaggcgcccagcacgaagcgtgtggcgggggaggagcctgccttggcccggaactccttggtggccacggacatgatgaacgcgcccagcaccagaccgatgatctccggccggacgtactgcaccttggctgcgccgtgcatacccaccgcgccggtgatgtcccgcaggaagcaggcgatgcagaagcccatgttggccgggttgcccagatgggtcagcaccacggcggccagaccgaccaccgcgccggcgatgaccacgatccaacttacttttttcatgtgatatgtctctcctttgcgttatttcttttaaagaatagcgatgccattatacgacactgtaccggaaaagtcaagaccgtgacaaacttcactttctgtggtatgatgggtcacgagctgtgaggaggtgcctgcatggaggccatttatcttgacaacgccgccacgtcgttccccaagccggcgggggtcagcgatcgaatgaaatactatctggactgcgtgggggccaacgtgaaccgttccgtgtataccgccgcccaggaggcggggctggtgacgctgacactgcggcagcggctggcccggctgttcggtttcccggagccgcctacccacgttattctgacgccgggtgctacggcggggctgaatatgatcatctccggccttctgcgtcccggcgaccactgcatcgtcagcagcatggagcacaacgcggtcatgcggccgctgctgcgcctgccgggggtggcggtcagccgcgttccctgtgacgccgagggttttgcagatctggacgccctgccggggctgttccgggagaatacgagactggtcatcatggcccacggctccaatgtctgcggcgcggtacaggacgcggcggctatcggccgcatctgcgcggaaaagggtgtgccctttgcactggacgccgcccagacggcgggacacctctccgtggactttcgggcgttcggcctcagtgccatggcggtaccgggccacaaggggctgctgggccccggcggcgtgggcgcgctgctgctgcgggacgatttcgccaaaaagctgacgcccctgatcgccggcggcaccggcagtgcctcggacagcgagtacctgccgccctatctgccggaccggtttgagtccggtacggccaatctccccggctgctacggctgggaggcggccctgcgctttattgaggagacgggcgtggacgttctgcggcagcacgagagggcgctgtgcgctcggtttctggacggtcttgcggatattcccggggtccgactggtgggtccccggaatatggaccgtcgggtgggcgtcatctccgtggacttcctgcgccgcgacaacgccgagatggcctatgcgctggaagcgcagtacggcatcctgacccgctgcggcctgcactgtgcgccctcggcccacaaaacactggggacgtttcctcagggcactgtgcggttttcgctgggctgggccagcacggaagcggacgtggacgcggcactggcggccatacgggccttggcatgaattaaaccgggcggcactgccgcccggtttttggttatcgcagaagaatacgcttgccgccgtgatattcgcccacggtgccgatgcgctgggcgctgggcactaccggtgtcagctccgccagcagtgcgtctgcgtccgcagggtctacggccatcagcaggccgccggaggtctgggggtcgaacagcaggtcctgtacggccagctcggtggtgcccacgtccacgccggcttcggcgaagctgcggttgcggtacataccggcgggcagcacgcccatccgggcgaattccagtgcctccgggatcaggtcgatggcggacacgtcgatatgcagtgccacgtcgctgccctgggccatctcgaagccgtggcccatcagaccgaagccggtcacgtcggtgcaggcgtggacccgatagcggaccatcacgtcccgggcggccttgttcagggtggtcatcatccggttcatgaagtccactgtctctttcgtcagcaggtcggctttcccggcgctggtcagcacgccgatgccgataggcttggtcagtaccagcacgtcgccgggccgcgcggcggaattggtgagcattttgtccgggtgaacaaagccggtcacggccaggccgtatttcggctcatcatccaggatgctgtgaccgccggtgatcagggccccggcctcatagaccttgtcatagccgccccgaaggatgtcatgcacggcctccttcggcatatcctccggcacggccatgatgttcagacacagcttcggctcgccgcccatggcatacacgtcgctgagggcgttggtggcggcgatctggccgaacaggtaggggtcgtcggcgatgggggggaagaagtccaccgtctgcaccagggccagctcgtcgctgatcttatacacggaggcgtcgtcgctcttgtcgaagcccaccagcaaattggggtcgtggtgtacgcggatgccctccagcagttgcgccagtacgcccgcgcccaccttggcgccgcagccggcgcacttggtcagttttgtcagtttgatgttctgttcttccatgacttgtctcctatcgcagtgcaccggtcaggtgcagtatggcctccagcgcgccgccgccaacggccagcgccttgtccgaggcggtggtgcagtattccggtttgcaccgtgggtccacgtcgccggatttcattcctaggtgtaccggcgtgccgctgggcaggataccccgcaccacgccgccgatggtgcatttcatgggctggccgttcacggtcccggcgatgtcaccgggctggacctcgtcgccgatgtccagtatccgggtgaagacaccgtctgccggggcgcggagcacgcgctcgccggcgtagccgccgatgaggccggggatgttggtgttgggcagggcgctgccctgatagatggcgcggcccagggtgtggccgcgcatggtctccactaccgcgtggcagtcctctccggcggtgaagccgggcccgatgcctaccaccacgggggcgtcggtgatgcgggtgcccagattgcgcttggccagtatggcgtccaccagggcatccgggtgcagctgctcacggcacaggcactccgggtcggggaggacgggtaccgcaccctgtgccagcagggacagcgcctgcgccgggctgtcggcgcggacggcccgcacatcctccactgttgtctcaccgtcggtgatggcgggggagaagcacaccgtccgccgtatggcggtggggcggggcaggtcggtcatgaccacctgtatcccggtgcggtacagccgcaaagcgatgccggtggcaatgtcgcctgcgccgcgtatcaaaacaagcatagctaaccatcctttcgttatccgtacaataacacaacgagagagggttgtcaacaaagccccgttgacggggggacgcaggtctggtaaaatggacccacgaaaggaaagaaggtgcttcagtgaacgacaacatcatcgtccatatcaccgcccgcctgttcgcggaggaaaagtgctacggtcccggggttcaccggctgttgggcgcggtggcgcagaaccattccctgcgcgcggccgcggcctccatgaacatggcgtattccaaggcgtggagcatcgtccgggcggcggagcagggcttcggctgcaaactgctccggtccaccatcggtggctccggcggcggcggcgcgcagcttaccgacgaggcccgacagatcatggaggcctatgacgcgtactgccgaaagctggatgcctacggacaggagctatttcgggaattgttcggcttctgcacagagaaataaaaaaggccgcccatccgggcggcctttttgcgggcatcaaatggtgggcatctccatacccaggcggcggtacatggtctttttcaccgctttgagaatgttctcatatccggtgcagcggcacaggtgaccggagagcagcttgcggagctccgcatcggagtagagcttgccgctgtccaggatctccacggcagtcatcagaaagccgggggtgcagaaaccgcactggatggcggactcctccataaaggcctgctggatgtcgctgggctcaccgtcggggctgagcaagccctccagtgtgcggatgtgcttgccgtcggcccacacggccagatagatgcaggagttgaacgtctcgccgtcgatgaggacggtgcaggcaccgcactcgcctacctcgcagccctttttcacggaggtcaggtgatagtcattgcggagcatatcggtcaggctggcgcgaacgtccaccatcttctctacgtccttgccgttgatattgcagcggatcagcttatactgcttgctcatgccagctcacctcctgccagctcaatggattttacgagacagcgcttggcgatctccacggcgatgtgctggcggaaggccttgctggcgcgccagctgtcacgggggttgatatcgtccaggatggcgtgggcaaaagtctccaccgtctcctcggtcaggggcttgccctgggctgccgcttcagcgctggcacaccgcaggggcacggggccggctacgccgtaggcgatgcgggcacgctcaatggtcttcttgtcctcactgagccggacgttgacgctgcaccccagggtggcgatgtccatggcgttccgcatggcgtacttgatgtagtggccatagcagcggtcatagctctccttggggataaggatggcggtctgaatttcgccgtcctctgcgcggatgtccaccttgccggccttgatatagaactcatggatgggcaggcggcggacgccgtttttaccggtcagctccacgatggcatcccatgcgtggagggtggaggaggagtcggcggaggtcacgccgttgcaggtgttgccgccgatggtgccgatgttgcggatctgagggccgcccaccatatccacggcctcacccagcacgttgatgtactgctggatgatggggtcgcgggtaatgtgggagaagctggtcagactgccgatgcggatgttctcgtcggcgtcaatggtgatgccgcgcagctcgtccagcccgtagatggagatcagctccgcaccggcgcgcttgccctcgcgcatctgcaccagtacgtcgctgccgccggcgatgatctgggcttccggatgctccagacggagggccaccgcgttttccacgctggaggcctcgtataaggctttcatatcatacatggcttagttgccctccttttcattccagctgtcgtggatcaggcccgccttgctgaactcggcgaacagcacgtggggcgtgatgggtgtgcagtcgatggccacgccggtggcgttgagaatggcgttgcggatggccggcgcgccggagcaggccggcggctcacccagagccttggtgccgaagggggaggtgggctcgggattctccacgaactgcgcttccagatgggggtgatccataaaggtggacagcttgtagtccagcagattgttgttcaggggcttgccggtcttttcatcaaacagcagctgctcgctcataccgtagccgatggccatggacataccgccgtggacctgggcctccgccagggcgggattgataagactgccgcagtcgtgaacgttgatgatcttgttcagcttgaccttgcacagggcgatgtctacctccacatcggcgaaggtacagccgaaggagtaggcgttgttgcggatggtgtaggtggattcggcggtgatatgctcgctgtccgccgcgttgtactgggcggtcatggccagctcactcaggctcatgagcaccgcgccgtcctgcttgcggacgatattgccgtccacgatatccatattatccacggcctgacgggtcagcttggtggcgtaggccaggatcttctgccgcagcagggtggcggtctgccggatggagaagccggctacataggtctggcggctggcgtaggcgcccaggccggtgggggtgatgtccgtatcctggcaggagaccacgcggacgtcccggtagctcttcaggcctacggcctcggcggtcatctgggcgtaagcggtatcagcgccctggccgatctccgtctcgccgcactgcatggtgacggtgccgtctaaattcagcagcatacggttgctggaggtctccagcgagatgggatagacggcggtgttgtaccagaacgccgccacgccgataccccggcggatgttgccggtatccttggcatactcggccttctttttgtcgtactctatgtattccttacccttttccaggcactcacggaaggagtcgtagtagttggtgttgccggagaagccgtcgtggaagcccttgggcatgatgtacttcatgcggtactccagcggatccatgccaacagccttggcgcactcgtcaatgttggcatcgtcggcaaaggaggcctgaggcatgccgtaaccgcgcatggcgccggccaccgggcggttggtgtacaccgtccacgcgtcgccctcgaaattgtcgcaggggtagatctgggggaaggaacccatggccttggccacgatggagtggccgtgggaggcgtaagcgccctggttggagaagcactctacctttcgcgcggcaatggagccgtccttgtgcaaccaggtgacgatgtggaagcggatggcgtggcgcacgcggttagagacaaacgtctcctcccgggtgcagtcgatacggacgcagcggccgcccacctgcgtggtgcaccaggcgcacaggggctcatacagggcgtcctgcttattgccgaagccgccgccgatgtagggcttgatgatctgaatgtccgcccagggacggcccagggcctggcccacgatgcggcggatgatatgggggatctgggtggacgccaccacgacgatacggccgttttcctcataggcaaagcagccgtggttctcgatgtggctgtgctgcacggtaggcgtgtcgtaccagccctccaccttgatgagccccggctcctgaatggcggcctgatagtcgcccttgcggatgtcggagtgcttgaggacgttgttgggatagccctcatggagctggggtgcgccgggctccatggccttctgcacgtccagcacgaagggaagctcctcgtactctaccaccagcgcgcggacgccctgcatagcggacacctcatcctcggcgatgaccacggcgatatcatcgccgtagtagcgcacatggcggttcagcaggttgcggtccgccacatcctgatggccgggatccatggaccagggatgacccgccgtggggaagcagtgctccggcacgtcgaagcaggtcagcaccttcaccacgccctcgatggcctccgccgcggacttgtcaatggacttgacgtagccgtgggcgatagtggcgtgcttgatgcgggcatacagcgcgcccgcaggcatacggtcctcgtagtattttgtccgcccggtggccttgtcaaaggcgtccacacggatctcgctctttcccaccttactcatagtaggcagcctcctgttgcaaaacttggaaatgtcgtctatattttttgctaatgatacatattcacgaaaattatagcacgggacaggggaaatgtacagcgaaagcgtgattttattttcggaataacgatacggcgaagcttgacggggcatactgaagctgatacactggaacacacgaaagagggtggtttgcatggcggagctgcggatcggctgcctggtcatggcggcgggcagcggcagccgcttcgggcgcaataagctggaggctgtggtggacggaaaaagtctgctgcgccgttcgctggaggcggtgccggcggaggaattcgcgcaggtgacggtggtgacgcagtacgatgccgccgcggcgctggcagaggaattcggcttcacagtggtgcggaacgaccgtccggaggacggcctgagccgcacggtgcgtctgggcaccgaggccatggcgggctgcggcgctattctatatcaggtggcggatcagccgcttctggagcaggagacggtgcggcgggagatcgaatacttccggacgcatccggaccatatcgtgggcctggcccataacggcgtgcggggcaacccgtgtatctttccccggaagtttttcccggagctgatggcgctggagggtgatgtgggtggaaacgtggtcatccgcgcacacccggacgcgctgctgctgtatgagacgtccgcggcggagctgcgggacgtggacacggtggaggcgctggccgcggtacaagaggatagacagatatgaaagagcacccctttggggtgctcttttacgtttatttcttgggtgcgtagggggtgttcttcagcggcagactgaattcccgttcgccggtaaggcggtaataggcgtcggcaatggcaggggcggtggggatggaggtgatctcgccgatgccgatggcgccgccggccacattcaggccgggcttctccaccacgatggcctggatctccggcgggatctggttggcgcggaacaggcccagcataccgtatttggcggtgggcttgcagttctcgtcgatggggtatttctctgtcagcgcgtagcccatggacatgaccacgccgccctcgatctgaccctccacgctcagggggttcacggccttgcccacatcgtgggcggccaccatcttcttgatgcggccggtgtccctgtccagaatacacatctgggtggcgtagccgtaggccacgtggctgacggggttgggtacgtcggcgcccagcgggtcggtcttggccagatactcgccgtagaactccgtgcccttcaggtcggcaagggatttgccggcgtccagctccgccttcagcttttcgcaggcgcggcgtgtagcctcgccggtgacaagggtctggcgggagccggaggtgtcgccggagtcgggggcgatccaggtattgctgcgctcgtagacgatatcgtcccgatgcagcccggtgttggtgaccaccacctgcaccagcacggtgcccagtccctggccgatgcagctggcgccggagtagatgtgcaccttgccgtcgccctccacgatgagcttgcagcggccccagtcgggaatgcctacgcctacgccggcgttcttcatggcgcaggcgatacccaccggatcgccgtttttcaccgcctcgtcataggcgggcttgatggcctccagtgtctctaccagaccggtggagtcatccacgatctggccgttgggcagcacaccgccggggcgaatggcgttgcggtagcggatctcccagggggagatgcccaccaggtcggccatctggttcagcagcgtctcggtgcagaagcaggtctgggtgacgccgaagccccggaaggcgccggcgggggggttgttggtgtagtaggcgcggccctcgatctcgaagttctcgtaggcgtagggaccggcggcgtgggtgcaggcgcgttccagcacggggccgcccagagaggcaaacgcgccggtgtcggataccacgctggccttgacaccctgaatgatgccgttttcgtcgcagcccatggtgaagtccatgtccatgctgtggcgcttgggatggacgaggatggactcctggcggctgagcttgaacttgacggggcgctttgtcagatagcacagcagcgcggcgtggtgttggacggacatatcctccttgccgccgaagccgccgcccaccaggcagttctgcacctggcagtggtcgtagtccacgcccagcatggacgcgcactcatgcatggtggtgtgggcactctggtcagtggtcagcagctttacgccgccgttgtccagcggcagcgccacacagcactccggctccaggaaggcgtgctccgtccacggggtggagaagtgctcggtcagcacatatttggaatttttgatagcgccctccgcgtcgccgcgggagacgtgcttgtaggcctggacgttgctctcctcctcgtcgaacaccagcggcgcgccgggggcggcggcctcggcggggttgtggacggcgggcaggacttcgtactccaccttcaccagcttcttggcggcctccaccgtctcctgatccacggcgcagaccagtgccacactgtcgcccaggtagtgtaccagctcgcccacgccgatcagggtgggctggtccttcttcaggtggcctacgttgaccttgccgggaatatccttctgcgtggccacgcagagcacgccgggcagcgcttcagcttcgctggtgtcgatggacagcacacgggcgcgggcgtactggctgcggaccgcgccgccgtagcacataccgtccacatagatatcgtcagggtactgcccatagccctgcaccttctcggccacgtccagtcggtggacgcggctgcccatctgccagtcatcggtggacggggcgggcagcttgccctcgcggaatatcttagccgccagcaggatgccgtcgatgatcttcacgtagccggtgcagcggcagatattgttgcggatggcgaaggcggcctcctcgcgggtgggatcggggttcacgtccagcagccccttggcagagatgaccataccgggaatgcagaagccgcactgcaccgcgccggcctcgccgaaggcgaaggtgtagacctgcttttcccagtcgctgagcccctctaccgtgaggatggtcttgccctccagcttgtccgtctgggggatgcaggccttggtgggcttgccgtcgatgaggacgtggcaggtgccgcaggcaccctcgctgcatccgtcctttacggaggtcaggtgcagctcgtcacgcagaaagcggatgagcttctggtttttttccacagtgacggacttgccgttcacggtaaatgtcgccatagtgtatctctcctttgcgcccggccgggcttatctctggtatttgcagaaattatagcacgggaacgacggaaaaacaaggtgagaaccgccgcattttgtccaaggcgtgatagtatatcgagaatatcggataaaaagaaagaagccgcccaaggcggctccttcaaacaaaagctttcttacgtctccagcaccggaagcatgatctgcagcagaaactggccctgctgggcggaaaacacgcacagcccgccgttgcgctgggcgatggcctggatgctgcggcatccgtagccgtgcccttcccggtcactgacaggcaggccgtcccgcatggctatcggtccggcgcagggattgcgtatctcgatgagaagcttgttctgccgcacaccgcagtacagggagatctgcttccggtcggcgggcaggtccgccacagcgtgcagggcgttttccagaccgttgctcagcagggagcacagctccgtgtccgaaatggctacatcgttgggcagtgaggcatccacggtcagcacggcgccctgccgctgggctttgtcggtgaaggaggagcacagcaggttcaccagatggttttcgcagaagcggcggggcgtgatggcctcgatatccgcctggacctttttgatatacgctgccgcctcgtccggccgttccgcggacagcagaccgtccagcatattcaggtggtggcgcatatcgtgctgatagacggcggtctgggtctccagccggtggagggagtccatctcagactgggattgctccagctccgcctccagcatggagcgctgcatctccgcgtcggtgcgccgctgcgactgcaggtgaaaggcgggcagaaacagcacatagaacgtcaccagcaccgtgggcagaaactcattcagcgcctgaatgccggaatagagtgcatcggagtagatcgtggtggcatagtcgaaaatataataggtgacgggcaggctgccgaacagcagcagcgccgccgttgaggaggtcatggtgttataggccgcggccacgaaaaagcggcgcaggagataatacatcaccggcatcagcaggatatagaccagctcggcggccagcgtgctctgcgtcagcgcctccacggcgatgcgtccccagcggggcggctggcagcacagatacgcggtgcaggtgctgacaatggctacgcccaccgattttttcataaacaaaatcaggatcagcaccaacggcacatggatgaccagcgggtagagctgctttaccgttcgttcgcccaaaagcaccagccccagtccctgcatcagcaggaacagcaggcacagcagcgtcagcaggtacttctgctgccgggagacatagccgccggtggagagatccgcgctgagcgccagtccatagaccagcaccagcacatagcagaatatatccagcgcggactgcatagataaatcaaacatattatgcgtccctcccggaaaacagcagggccagatagtccttttgcagctggccgtacagcaggcgggacacgggcacgttatggccgctgaaggtgatgaccccggcgggggagagcttttcggcctggagcatattgacgatgtaggaccggtggacccgcatgaactccgggcgggccagcagcgccccttcatactcgcgcatggaggccgccacctcatagacagtgccgtcggccatgttgaagaacaggtgtttgccgttgacctccacatagctcagatgggaaaagggcagacgcaccagcataccgttggacttgacggtcaggccgtcctgcggcttctgatcccgcagatacagcttgtccagcaccggatagagcagcttggcattgatgggcttgagcagatactccgccgcccggacgccgtagctttcgtaggcgaagccgggagaggtggtgagaaagataatgtccgccgccgcgtcgaaggaacggatctcccgtgcggcgtccatgccggtcatgccgggcatcagaacgtccagcaggtacagggtgaagcgctcggcgcgggcagcgtccagcagctggccgccgctgcggaaggtctgaaagcggacatcggagcgccggtcagactgccaggcctgcaaaagcgccgtgagcttttccagttcctcgatctgatcatcacatactgcgatatacatggcgccgcctccttgtgcttttcttgtgcttcacgcggctttattttatcataagaaaagggaattgtcaccgcaaattttgcatttcacgggcgtgtgtacgcatttcgcggcatatacatccccaaactcccccacatctggtacgatgtccttcgcagggaccactgtgccctgcggaagggggcgtttgcgtatgaaatgggtcatctggctcgtggcgatcgccagcacttcagcgcttgtcgccctgtggttctgggaggtccgccgtctgctgcgtcagcaccggagcatggtagagagcgcccggtgccagctggccgcttttgaaaagcgggcggcagaggctgcgggcaatgctgatgtggcggaggtcctgcggcgcagcgagagtatttaccggcaggccgccggcaactataacgagacactgcatcggccatggatctatattcccgggcggctgatgggcttccactatgaggaggccgcgaaggtccccggccgggtacatatatagatgaacaggaaagagaagcaacaaaaaccattgggagggtattgttatgcgcgatgaaatgaaacggacgatgtttgaactgttcggcgtgggcagcgaggatgacaaggtgctggccgccggcggaaaaaagcctgtcgcaaagccggagccggtaaagaccgcgccggtgcaggcaccggtacagcctgtggtgaaggccaaggccgccagctatctggctgcgggtacttcactggagggcacactgcgctccgacggcgatgtggagatcgccggagcattcaagggcgaggtcattaccaccggcacggtgacgctgcgctcggtcatccagagcaatatcaccgccggcagcctgaacctcatcggctgtacgctgaccggtgatgtaaaggtcacgggcaccgttaccgtcagcgaggattctcaggtgacgggtaacatcaacgccaaggagctgctgtgcgccggtaaggtcaacggcgatctggagatcaccggcggcactaccctggaggagaaggctcagatcagcggcggcctggtgacaggcactctggcggtggtcaagggcgcggtcatccgcggcggcgtggagatcaaggcgttctccggcccggctaagcaggagcctaagcaggagcccaagcaggagcacaaggccaactgactgcgatcatgtgatcggcggccgtgcagcggacgctggtacaggaggtatatattatgggcctgttcagcaacaatatccagtatgccggcggtttcattgagcaggaggacggcctggttatgatcgccatgctggacggcaccggtatgaataccctgtatttccacctgtatatgggcgagtaagctgtgataaaaaaggagcacccggccgggtgctcctttttgcttttttattctttcgcctcgtccgcgtcctctgtttgaggcagcagcgttacctccgccgcattcacctgatggtccagaatggaggtcacatggatccgcatcccctcagcctccagcgtaatgtcctgcgggccgtcgtcgggtatcatgcccagcgcgtcgaacaccaggccggtcagggtgtcatgctcctcctggtccagctcgatgccaagtgcgtcctccagatcgtccagctctacgttgccggcgatgaccagggagccatcctcccgcttttcgatgcggggctcatcatcgtccgggatgttgctgtcgtcgctgcccaggtcgcccaccagctcctcaaccaggtcgttcagcgtcacgatgcccaccatgccgccgtactcatccagcaccacggccaggggattgccggtacgcttcatgttgcggaacagggcgtcggccttaatggtctccggcacgaagtacggcgtgcggacggcgccggccattacgctctcccggctcttatccgccaggcggaagtactccttggcgttcagaatgcccaccacattgtccgcactgtcctcgcacacggggtagcgggtgtgccgcgtgttgtggatcgtctcggcccaatcgtccatggtgtcgtccagccacagcagatccacgtccgtgcggtgggtggcgatctcctcggcggtcaggtcgtcaaactcaaagacgttctggatgaactccttttcctcatggtcgatgccgccgtgctcgctgctggcgtccaccatcatgcggatgtcctcctcgcccacctgctcctcggcctcgttgggatcaatgcccagcagccgcagtatgccgttggtagacgcgctcagcagccacacgatgggcgcgaacagcttggagatgacagtgatgagcccggagatgttcagcgctaccttctccgactgcttcatggcgatccgcttgggcaccagctcgccgaacaccagcgtgaagaaggacaggatcagcgtgatcaggatcacggcgagggtgttcagcgtggcgggggggatcgttacgcccaaccccaccagccagtccaccagcgggtcggagaaattctccgccgcgaaggcactgcccagaaagcccgccagggtgatggccacttgaatagtggccaggaacttggccggctgggccgtcagccggctgagccgcttggccttccggttgccctccgacgtcattttgctcagctttacctcgtttaccgacagcacggcgatctccgcgcaggcgaacacggcgttcagggcgataagcaccacctgtaaaagcaataaccaacctattgaggtatccaaattttgtctcctttcccgggctccgctgttttcgcggagcgcctcctctcgctttttgcgcgatgtaaaaagcgcaaaagacacggcctgtgtgcctcgcgcacaggtcatgtctcacgtcattctctgttgttctgatctcgttcagggcaagagtcgctgccggctgtgtccatcctgtgatagaacctccctgtatttttggttatgttttattatacagatgtgtaggggatatgtcaatatgaccggagggaaaagtgccgcggacgtcatgtccgcggcacagtcatgttacgctgtcagcagcgcttccagccgcgcacggatcaggcccagcagcgtgtcgttgtccggcttgtcggtgtattccgacgggtcgcacagcatggtcagatcctcggtgaagtgccccgcctcgaacacgtccagccccgcctgctgcaagcagtcggcaaaccgcgtcagcgcgccgttgctgtccagctcgccccgctttcgcaaggcgccggcccaggcgaacatggtggccagggggttggtggataccttttctcccttccgccagcggtagaagtggtcggtgacggtgccgtgggcggcctcatactcgaagcagccgtccggggacaccagcacgctggtcatcatgggcagggagccggaggccgcggcgatcaggtcgctcatcacgtcgccgtcatagttcttgcaggcccagacgatgccgcccttgctgcggaggaccttggccgcgatatcgtcgatgagcgcatagcggtagtgaagacctgcctgttcaaaggaagcccggtactcctcgtcgtacaccttctgaaacagcagcttgaaggtctggtcatagtccttggagatggtgtccttggcgccgaaccacacatcctgccctacggacagggcgtaggtgaagcagcagcgggcgaaggagaggatggaggcgtcccggttgtgcatggcctgcaccacgccggggcccttgaagtcgaacaccgtctggcggctcagctcccggccgctttcatcggtaaacaccagctccgcctttccggcaccggggacacggtattccaccgccttgtacaggtcgccgtaggcgtggcgggcgatggtaacaggcttctcccagcaggtcaccacaggcttgacccgcttcagcaggatgggtgcgcggaacacggtgccgtccagcgccgcccggatggtggcgttgggggacttccacagctgggtcaggccgtactcctcctgccgctgcaggttgggggtgatggtggcgcacttcacgccgatcttcaggcgcttgatggcctccgctgcctgtgcggtgacggcatctgccgtctcctcccggtggggcagggacaggtcgtagtattcggtgttcaggtccacgaagggcttaataagtgtgtcctttattataccccacagcacatgggtcatctcatcgccgtccagttcggcgatggggacaggcattttgatcttttccattcagttcaccgcctttgctgcgtaatagttgatgaggcacccgcgcagcagcagctcgcgctcctccgcgttggtgtttttcagatagaggaggaggtccgttttcctgccgtcatgcagcagtaccgcggggaattcctcgtcgccccgggccaccttctcccgcacctccgggacgtagataaagtcgccgggtgcgccgtcaaagctgtcgtccgccgccagtgtaaaaggcagcaggccccagttgacgcagttggagcgatagcgcttggtggcgaactcgtagcagatattggcgctgccgcccagtacccgctgacaggaggccgcctgctcccgggcggagccgtcgccgggtttgttggcaaagataacggagccgatgtgcagtcgggacagactgcgcgtatccagacccaatgcgtgcagcgtatccgccagcaccgccggtatcccgcctgcggcccgggcgctttccagcgccgccgcggccttggcccggggcacgtagtccgggtcgcggcgggacagggtgaactgcgccagcttcatagggttggaacggtaggaggacgtctcgccggaggggatgagctcgtctgtggtggtgacctcatcccgcagaacggaggccacctgtaggagcagatcatcggatagggcggggatggcgggccattcggcgatgttgggaccgtattgcagcggggcgtccggctgggggtggccgaagccgcggtagacccgcttgtcgtacacggaggcgtcgaaccggcgctccgcgggagagggagcgtcgtagtccacatccgccgcggaggtgagcacaccgtggttccgcgcggtggcggcaatggaacgggcgtccatgaggatcacgccggacagctggccgtcgccgggcttggagccctcgcggttggggaagtttcgggtggtgtgacggatggatagggcatcgttggcgggcacatcgcccgcgccgaagcaggggccgcagaagcagggcttgcacaccgcgccggcgcgcagcagccgggcggacacgccgttttccaccagctccagctccacggggacggaggggggatacacggagaagtcaaaattcccgctgcccacatcgcagccgtccaggatggcagccgcctcggcgatgttgtcatacaggccgccggcacatccggcgatgacgccctgctctacatggagcttgccgtcctttactttgtcggtgagatgcagctgcaccttgccgccgaactggtcggcggcccgcttctctacttcacgcaggatgtcgccggggtcggcgatcagttcccgcagcgtcaccgcctcggagggatggaagggcagggcggccatgggctcaatggcggacaggtccagctcgataaggccgtcatagtacgcgccgtcctcgggatgcaggggtgcatagtcctccgcccggccgtgcagcgccagatagtcctgcacggcgccgtccgtctcccagatggaggtcaggcaggctgtttcggtggtcatgacgtcgatgccgatgcggtagtccatgctgagacggccgatgccgtcacccacgaactccagcaccttgtttttcacaaagccgtttttatacaccgcaccgcacagggcgatggccacatcgtgggggcccacgccgtggcggggcctgccggtgacgtgcaccaggatcacctggggcgctgccaggtcgtaggtgttacgcagcagctgcttgacgatctcgccgccgccctcgcctacgcccagggtgcccagcgcgccgtagcgggtgtggctgtcggaaccgagaaccattttgccgcagccggccagcatttcccgggcatactggtggatgaccgcctggttggcgggaacatagtcgccgccgtattttaccgccgccgacaggccgaaggcatggtcgtcggcgttgatggtgccgcccacggcacacaggctgttgtgacagttggtgagcacatagggcaccgggaattccgtcagtccgctggccttggcggtctggatcacgcccacataggtgatatcatgggagatgagactgtcgaacgtcaggtgcagcaggccgtcgccgctgccggtgttgtgggcgcggaggatgcggcaggccatggtcttctcccgggctgccgccatggcgggtgtggcctcacggacggcgccgccggtccagaggacgggggagtcgtgcagcttgatcataggatagcacccctttcgggaaatcagagtgtcgggcacaggcggcccgtgcaataatgtagtcagtatagcacgatgctgggaaaatgcaagaggaaaatcaagaaaattgcaagttgcaaattttcattttgcaaaaaacttgaatataaacggataaatttgcgttagagtaaaaaattttgaaattttaaaattttgctcttgcaaaatggaggcggcggacgtataatcacccatgaaacaacgtaccgccctgcggcgaaaggagaaaccgatatgaccgagaaagacaccacgattttaaaacagtataccaatcctctgagccgcagcatccaggagcagtacgccatcagcccggatcactaccggggcgatataaagctgggcctgcggaataatgatggcacgggcgttttggtgggtgtgtccaaggtgggcagtgttcagggctatctgatgcaggacggtcagcgtgttcccgcccccggcaagctgtactaccgcggcatcgagctcaccgacatcgtggaggcccaccgcaaggccggcaccttcggcttcgaggaggtagcctacctgctgctgatgggttatctgccctccaagagcgagttggcctacttcgacaagatcatgaaccaggcccgcaagctgcccgagggctttaccgagggcatgatcatgcggcaccccagccacaatatcatgaacgaactggcccgcagcgtgctgagcctgtattcctacgatccggacccggacaacacctccatcgacaatatgctgctgcagtccgtcaagctcgttggctatttcccgtccattgtggccaatgcctacgcggtgcagcgccactacttccacggcgactccctgcatatccatttcccggtgccggagctgtccacggcggagaacttcctccgtatgatgcgcccggacaagagctacaccgatgaggaggcccatctgctggacatgatgctcatggtccacgcggagcacggcggcggcaacaactctaccttcgtctgccgtgccatgtcctccagcggcacggacacctacagcgccattgccggggctgtcggctccctgaaggggcccctccacggcggcgccaacgccaaggtcatggagatgttccgctatatcaaggagaatgtggatccccacgacgacggctccatcaaggactacctgaacaagctgctggacggccaggcgggcgatcggtccggcaagatctacggcctgggccacgcggtgtacaccatgtctgatccccgcgccgtgctgctgaagaagtacgcccagcgcatggcggagctgaagggctacgccgacgacttcgccctgctgcagaaggtggaggagctgggcctgcccatggtcatggaacgcaagcacagcgacacgcccatgtgtgccaatgtggatatgtactccggcctggtgtatgccatgctgggcatccctgaggaggtgttcacgccgctgttcgcctccgcccgtattgccggctggtgcgccaaccgcatcgaggaggtggtcacctgccaccggatcatgcgcccggcctaccgtgccgtcaccacccacgaggcgtatatccccatggaccagcgcggtgagcatctgcacctgtctgcggcggactgatgcaagaaaagagccgtccccatgggggacggctcttttttacaggaccaggttttcgtcggtgatctcacccttgcagaccacgttggtggggccggtcagatacaggtcggtgacgcggccggccgcgtcacgttccgcgtccacatacagcgtgccgccggtcatatccacccggacgtgtttgccggagaccttgcccagcagcgtcagcaccgtcaccacggagccggtgcccgtgccgcaggcgtaggtaaaatcctccaccccgcgctcataggtgcgctcgtacacatggtccggaccgatgatctcataaaagttcacgttggcgcccttggggaaatccggataatgccgcagcgtccggcccagccggagcagtgccgccgtgtcatagtctctcaagccggcgataggtaccgccgcgtgggggatgccggggtcgcccagctccacataggcgcagtcgtaggtgatgccgtccacctccgccgtaccgtccagccgcatatggcagggatcgttgagccgtatgcggtagagccgtttgcccattcgccagcccgtcacaagaccggcagtggtctctacccgctgtgtttcgccggccaggccgttctcgaacccgaagcggcagatgcaccgcgcgccgttgccgcacatctcacccgtggagccatcggaattgaagaacagcattttgtagtcgccgccacaggtgggcggcttcaccaccatgaagccgtctgcgccgatggacatatgcctctcacacaggacgcggacgatctccggccacctgttctcggggatggcgttccgacggtcgtccaccacgataaaatcattgcctgccccgttcatcttccagaattccatgatagccctccctcgcggtattttctgccattgtacagggaactgccgccattgtcaaatacgctgtccctatcgcccgcgccaaaaagaaaagccaccctttagggtggcttttccgtgactgcccacaggttttgttgtccgtacttccacataccgcaggggagggggagtgtgagggggaaacctttgcgggtttccccactcgcgttcagtcatccgcccgcaggcgaccacttttgcacagcaaaagtgccgcaccaaaaaagaagaggcacacgaacgtgtgtctcttcttttttggtgcgagcgatgggacttgaacccacacgaccttacggacacaagcacctcaagcttgcctgtctgccgattccagcacgctcgcggacaagatacctgattattatagcaaaaccgggcagtttgtcaagtaccggaggaaaattcgcctgctgcagataaaaaagaccgccgaagggcggtctttcttatacctttttattcgttccccgggaaactggggatggtggcgaagccccgctgcaggtcctcgtcggtggggatgacatcgctcatctcgccatcgttgtacttgccgtaggccaccatgtcgaagtagccggtaccggtcaggccgatgacgatgttcctggcctcgttgttctccttgcacttcaccgcctcgtcaatggccacccggatagcgtggctgctttccggcgcgggcaggatgccctcgcagcgggcgaacagctccgccgcctcgaacacggaggtctgctccacgctgcgggcctccagatagccgtcgtggtacagctgagagacgatgctgctcatgccgtgataccgcaggccgccggcgtggttggcggaggggataaagccgttgcccagggtgtacatcttggccatggggcagatcttgccggtgtcgcagaagtcgtatttgaacacgccacgggtcaggctggggcaggaggccggctccaccgcgatgatcttatagtctgcctcaccgcggagcatctcgcccacgaagggggagatcaggccgcccagattggagccgccgccggcgcagccgataatgatgtccggcttgatgccgtatttatccagcgccgccttcgtctccagaccgatgacggactggtgcagcagcacctgattcagcacactgcccagcacatagcgggtgttgggcgtggaagcggcgcactccacggcctcactgatggcgcagcccagagagccggtggtgtcggggaactccgccaggatcttgcggcctacctcggtggtcagggagggagagggcgttacctccgcgccgtaggtccgcatgacctcgcggcggaagggcttttgctcataggagcacttcaccatgaacacatggcagtccaaccccagataggcgcaggccatgctcagcgccgtgccccactggccggcaccggtctccgtggtcacgccggtgagcccctgctccttggcgtagtaggcctgagcgatggcggagttcagcttgtgactgccggaggtgttgttgccctcgaacttgtagtagatgtgcgccggggtacccagcttatcctccaggcagtaggcacgcaccaggggagagggacggtacatccgatagaaattccgcacgtcctcggggatggggatataaggggtatggtcgtccatctcctgctttaccagctcggcgcagaacacgtggcccatctcctccgccgtcatgagcttcagggtgccggggttcagcaggggcgccggcttgttcttcatatccgcgcgaacattgtaccaataccggggcatctcgtcctcggagagatagatcttatagggaatgctgcggtttttcagttctttcatggtgtttgtctcctttcagtattggtcagcgcggtacactgtgttacgcaaaatagtcgatctgcatggcgtgcttgaccttggccagggtatcggccgcagcggcctgcgccgcctgggtgccctgccgcagcacgtccatcacatagccggggtccttttccagctcctcgcggcgattacggataggctccagcgtctcctgcaggacgttgttcaggaacttcttgaccttcacatcacccaggccgccccgctgatagtgggccttcagctcgtccagattggcgtagtccggcaggtatttggcaaagtgctcatcattgcagaaagcatccagatacatgaacaccgggttgccctcggtctggccggggtcgctgacctgcaggtggttggggtcggtgaacatacccatgaccttggtgcggatgtcctccggcttgtcggccagatagatgcagttgcccagggatttgctcatctttgccttgccgtcggtgccgggcagacgcaggcaggcctcgttgtccggcagcagggccgtgggctccaccagcgtctcgccgtacagctcattgaagcggcggacgatctcgcgggcctgctccagcatgggcagctggtcctcgcctacgggcacggtgtcggccatgaaggcggtgatgtccgccgtctggctgacgggataggtcaggaagcccatggggatgctgtggttgaagccccgcagctggatctccgccttcacggtggggttgcgttccagccgggccagcgtcaccaggttcatgtagtagaaggtcagctccgtcagctcacacaccacggactggatgaacatatggcacttggcggggtccagaccgcaggccatgtagtccagcgccacctgtaggatgttctcccgcaccttaccggggttgtcgaaattgtcggtcagggcctgggcgtcggcgatcataaagaacagcttttcaaatttgccgctgttctgcaggatgacgcggttgcggagggagcccacataatggcccacgtgcaggcggccggtggggcggtcgccggtgaggatgatcttacccataatcgtgattcctttctgtatgagaaatgttttttcgagacaacaaaaaagtctgtcccatggaaaatccatgggacagactgtaaatacaaatctgcggtaccacccacattggcgtaaaaacgcccactttgcgcgcactgtcatgcgttccgccgggataacggccgcggctgccgtcgggtattactcgccatttggctttctccccgccctcgtaagtccattcaccgcacgttccgctgccacgctttcaccgatacgcggctctctgaaagtttcctgtgcgattactcctcttactcaacggtttttgaagtatggggttattgtatcaccttttttgcggatgtcaagcaaaaattttatcggacggcgctatctgcacagcatcttcagcagctgcggggcggtgtccgcgatgcgttccgcaccggcaatttccagtttttcacggccgcggaagccccagctgacggcgatcagcggcagaccggcgttgcgggccgtggacacatctacctcgctgtcgcccacatacacggcattttccgggcggacgtcgagatccgaaagcgcttgtgccacaagggctggcgatggtttcgggtccacgccgtcccgctggccgagggccggcataccggggaaaaacttttccgccagcgccttggtggtggcgtccggcttgttggagacaacggcggtcttcacacccattttttccagctccgccaggacctccggaatgccggggtacggcgcggtctttacgcaattatgggcctggtaccagtccttgtaggaggctaaaatctcgtgaaaccgttggggcgcaatgggttcggggatggcgcgctccatgagcttcgcggcgccgttgccgacgaaggcgcgtatttcctcgagggtgcgctgcggccaaccattttcaagcaggatatggtttacagcgtcctgcatatccgatagggtgtctaaaagtgtgccgtccatgtcgaaaagaacggcctgaaagcgggggcaaagagggaaattcatgtggcaggttcctttacattcaggttattttatgttgcgctaatggtcactttatcttgctcttaatgaagtattatagcaaactgtgaggcacattgctatatgcagttgtcgtttttttgcggtgcggcacatttttggccggacagatgggtcagcaggtggggaaggaggatactgcccgggatcagcaggatgccgataccgcccggaagggtgatctgcgccttcgggagcgccgcgccgcggcccacggtgcggcggctgaggcggccgaagggcgcgctgccgtctgcggaaaaggcgggacggacgccggcagagccgacgcccgtcccaatgcaaaaggggaacacacatggacgtgcgttatacgcttgttacgccttcctgccgctcttgaagaacgcgccgatgacctcaatgaccacaaagacgatcaggtaatacaccacgtttatcttgtgagagtagatagcggcgaacaccatgaacagggagcacaggatggccagcacgggcatgaccttgccgcggaagccggacagatccctgcgcttgagcagagcgatgtagatggggatgtaaatggcgtacagggtgatgatgggcagctcggaggagtcgaacttgaagggaccgaagccccccatgatagtgccgccgtagaagtacagcagccacagggagctgaccagcagaccgaacacggcggagttgttggccatgttggtgttggcgtccacgttcttgaacatggccagcttggggctgccgctctcaacggccagatcgaacatgccgcgggtaacagccatggtcaggccgttgcaggtgccccagcaggagatcacaacgaacacgaagatggcagcgccgcccacctggccaaagatgttctggaaggcgatcttggcgccggcttcgccgccggccatcatgacctcggactccaccgcgccggccagaccgacatagtagatcacgtacacgatggcaacgatcaccgtaccgatcagcagcgcgcggggcatgttcttcttggaatccttcagctcggtgccgatggaggtggcacagatccagccctcaaaggcgaaggccagggagacgatagcgccgaacagaccctcggtgaagggcatctcggtaacgacattggagaagttgaacgcggtcatgccgctggtcagacccacgatggtgccgacaacggccatcagcagcagagggatcagcttgatgatggtggtggcgatggcgaacttaccagccagcttgggagccagagcgttcatggtgtaggtgacaaccatgaaaacaccggccagcatcatggtgcggccgccgacaacggcgtcatcccatcccatgagcacaccgaaatagcgggcgggcagccagctcagcacggacaccagagagggatagtagataatggccatgaaccagcccacatagtagccgtagctcttgccgcaggaggcgctggcgtagcccaccagaccctccacaccctcgtggctctgcgccacgacgccgaaggtgcaggcgctgatgatcatgacaacgcccatgatgatgaatgccagaataccgacagacagattaccgccggtctttgtcaggacagcttcggccttgaagaacacgccggagccgatgacagtgcccaccaccaatgcgatggctacgggcagcgtataccgtttttccataattccgttttcctttctgatctctcctcataattggatcgtgagacttttcacaatcacagcatcattatagcgcgttcacgatttattcacaagccttttttgtctgtgttttgtagaaaaattcacaatatttttaggtaattcgccaattcgcgctttacaccattaaggtttttagcgggtttccgcagaagaaaaccgcggcgcaccgcggcaggcatacagctgcttgaaaaaccgcgaaaaaagcaggaccggcggggccggtcctgcatggcaggcagaggtcgttatacgttgaagcggaagtagatcatgtcgccgtccttgaccacatactccttgccctcggagcgcagcaggcccttttccttggcggcggccacgctgccgccgcaggccatcatctcgtcgaagttgatggtctcggcccggatgaagccgcgctcgatgtcggagtggatcttgccggcggcctggggggccttggtgccctttttgatggtccaggcgcggcactcgtccttaccgtaggtcaggaaggagatgagacccagcaggtcatagctgcactggatgagacggtccagaccggacttttcgatgcccaggtccgccaggaacatggcgcgttcctccgggtcatccagctcggcgatgtcctgctccagcttggcgcagatgggcagcacctgggccccctccctggcggccagatcgcggacggactggaagtacttgttgtcctcatagtgggcgaagccgtcctcgtccatgttggcggcgtagatgatgggcttgaggctcagcaggtccgccgtctcgacgatggcgcggtcgtccttatcgcacgcgaaggtgcgggcggacttgccgctgtccagatgcgccgccagggccttgaatacctcggcctcatggaggaacttcttgtcgcccttggcggccttcgtggccttctccacccggcggttgaccatctccaggtccgccatgatcagctccaggtcgatggtttcgatgtcgcccagggggtccacggggacgttctggctggcatcggccaccacatgcatgatgttctcgtcgtcaaagcagcggaccacatggacgatggcgtccgtgcggcggatattctccaggaacttgttgcccaggccggcgccctggctggcgcccttcaccagacccgcgatgtccacgaactcgatgacggcgggggtctttttgtccggctggtacatctccgccagcttgtccagccgcgcgtccggcacggccaccacgcccacgttgggctcgatggtgcagaaggggtagttggcgctctctgccccggcgttggtgatggcgttgaacagggtgcttttgccaacatttggtaatccgacgatacctaatttcatatcttcatcttctcctttattttcgaggaagaaagttgcagaataacagtttaatcttgcgattttcggaactttcttcaattataaactttttgacgggtgatttactcaccttttactcacctttttacgcgcttttggcttcttcaaattgacgcacagcttgaaacagggagtcatcggtcacatggacgtatttgtccattgtagtcttgatgctggcgtgacccaacagcttttgcaataccttgggcggcatcccgcgctcgattgcccgcgtagcataggtgtggcgcagggcgtgcatacagaaatgctctatacctgcccggtcacacagcttatacaggtgcgtatcatagctgctgttctttgcgggcattccggtacggaagttgataaagacaaggtcgcgcatattcatctttgccttttccgctgtccgccggtcaacataggtcagcactttgtccagttcggtggcctcttttcggtactcccgtacttgatacaagtcccacaggatttgataggcagtatccgttaacggtatcgtgcggtagcttttcttggttttcggaggccctgcccgccactcctgttgcttatagcggaactccagcgtcttgttaaccgtcagcgtgtgccgttcccagtcaatagcgtcccatgtcagaccaatcatttcgccggtacgcaagcctgtctccaaaatcaaggcgtactgcgcgtagttgtgggaacgctttgccgcctccatgaacttcgcctgctccgcgaccgtcagaaagtgaatttcgtccggggcttttacagaggcttcaaaccgtaccccatccaacgggtgtgtgtcaatcagcccgttttccttggcagccttgaacatcgtccccatcgtgatatacgtctgtcggatagtagaaccggcataggaggcggtcatgctgttaagtacagttttgcagtgcatgggcttcacgtccgtcagcagcatatcgcctaatacgggctttatattcttttcataacgttcccgatagttccgtatggtgttcgcagccaagccggtgagcagattttctcgccaaaatgtttcccacgcgtttaccgtcatagggacaggcttcggctttaccgacgggtacagttgatgatacagctgctctttctgccaattttgggcatccctcaaattctgaaagcacttttccaaacgccttcccgctttgtctgtgcatcgtgcgtagtacaggccatcttttctttgacctataccttttccaagctcttttcctttcaaactttttcccatatttagctcctctctgccacagagaaatgagccatgtaacgcgataattgtaccacggtagcttcactttctcaatagataaacggtatttttcttaactgcaaggtgcagaaatgccctgccacacagcggcgacagggcatcccgcgcccatcaaacgacgaagcggctggaaatgtattcctcaaactcttttcgcttgaccagtttccgactgcccacatacagtacgaagggacaaccttcctcccgcaacatggcgtcaatacgattgatgccgatattggagtatgcagcggcttccttgatagtaagcaacagctttttgtcaatagggacacgtgactctgagtccatggcgttcacctttagagcgttttatcgtcaaaaagaaacgcctgaaataccgtcccgtcatggagcaaaaaacgcccacgcgacgttttgggaatgcggtcagcggcatccgtactgtcaaggatgatttgagaaagaacgttatctgcccgcccgcaaatgcgacaatcgatgttgtttttgatttgacccgcaaggatgttggcatcaggccgttgtgttgccaaaatcaaatggataccaaaagcgcgcccctgccgtgcgatggttgccagcctgctctccacctgcgcgacctgttctttctgttctttgctcaagccggtcttatccagcacctctgccacctcatcgcaagcgaagatatagcggggcagattttcatctgtggtcgcattatattcgcccaaattggcgcagccagcattcttgaaaagccgcttgcgttcctccaagatagcaagaagttcgtccagcagcggcaccaactcctccaaggtaaagcaaaagcggcaatgttcgtgccaaacggcggggtaatccacgccgcccttaaagtccgccacgcagaccaccgcgccctttttgatggactccatcacgagcagcttgagcaggacgcttttcccactcccggtagaacctccgaggagaatgtgcggtgttgttgccaagtttacagtcacaagcccagcaaggccgcgtcccagtaccagcacaaaatcctcgcggcttagatagcgatttgtccatggaagtatagcaggcagcgcaccgctggcagggacaactctcagctgcacggtacggttatttttgccctgttcgatggaaataatgttaatatccaatgcgctttccagtttttcgcggtgatcctcaaattgcgtgaggtgtacgccgtgactgagaaaagtcagcacctccactgtttcatcttccttgtgtcggtcgatgaggacgggatattctcccgctgcgtttttcagcccaatgcgttgaatgtcctgcgcgatggaaagaaaaccacgcggcagtcccgccgcagccgttccaaaagccgccagcattacgccgaagatggcgaatgccatcccgtacaagccacgctcaaacgtggccaatgcgccatctggcacagtcagcatcgccagcaggagcaacagcacgaaagcaaccacggcaatgattgcccgcgtccgcgtctgacggtctgagcgaatatttctcattccgcttttgatgaagtggcacagcaccttgattttgaaatccgttgtcataaaagtctcctgtttatatttgcggttgtaacggtaacgaagagggtgagggtaatactaacctcaccctctatacagcccgaactttggttatcccgataatggcagtctctccaacgcctcttcccgaagttcattgtagcctgcgtatcccaccatagattgcgtatacctacagaaatggtcaccatcgcggaaacaatatgttatgtccgtcaggcggcgaaagaactgctcaatcgggtcagatttttgcaaacttggtggaaccattaacgcatatagtgcttccggtgggaagattgaagcaatgtaaacctcattccaaagagcaaaaatattggcgtagcgggcatggatttgagatttatatttatcgaggattgacagcaatacgccatatggtataccgcctttgaactcatccaagaacagaatgggctggccacgataaaggtcaaatccaccgttcagatagtcagtgacgtggtagattttgtcttcgccgtactcttcgcaaagttccacatatttatgagatttccctgttccagagtttcctacaaaataatgcgcctttatctctcgcagtacaggcgttcctcggcgtttgcgttccatatattcagcggttaccatacgctcataccgacgaaagcgaaactcctgtcggaaaatttcctcaggtgtcagcccagcatccagcaaagccgcgatttcgtccaagtcactgcgcttgccctgcgccgccttgatttcgccgtgacggacgatgcaaatgacctgctcacccttttcatcaaaaggtggttgtttttcaatataggattctgcctgctttttggtgcccttggtgacctcaaaatgcgcccctgcagcataactggatttaaccgtagagaacctcatggctttggcgtcttccagtaccatgtgaatatgaggcagaccatccgccgaaacgcagtaagcccatgctcctgttcgatctgcgccacctatcagccactcatcgcgtaggcgggaacacacttcctcaggtgtgcccgcatatccgtgttcagccggattattcagaactgcaaaccatgatttggtgacggtttctttcactgttcttctcctttcccagcagggcagctatagtccatccctgccgttttttcaaaatgtgtaagtttctatcttgaccgccccaaataggggagcccgcggagactttttgtgaagccccgcaggctctgacgggggcggtcgagtcaagttttcaaaacatgaatgttttcagcagtcacggtaataaccacctttttgtcaatgtagtaaagatgaataaccatcccatcaaatctaatgtttggattttttgccgcatcttccactgaaatcttagattccccaggaaccgataccctaacggacatatagccccggtcggtgcagagaacattgtagtaggtgccgtctgccttgtcagttttctctccctccgcataaacgtacttcggcgtgatccccgtcaaaaggaaccgatctcccaacgttgaagccacgtctaccttgatatctttaagcttaatcatgttttttgttcctcttttctatcttttggcttgtcgatcgatcgtgccttcagtatatctcacacttcccgcgaaaacgttgcgtcgcacgcaacgtttttcaaaataacggagctataattaagatttattcaaaacttgagagcaagggttttccacatgcgtcaaggagcaaattgattttctctaaactccatccctgtgtacgcccatatctgtaaatagggcgccacggttcatacgaatcccaccacgcatcttcttctgtacaaggaactttcaaggcagctataattgccgccagccccttaggtgtcaaacaaattccctcgtttataatacgagagatggtggagttgctcataccggtcgtccgagcaagcgccgcgtttgacatattcagttcttctttcctatagaaaattttttctttaatagggatagggggattaaagaattcttttggcacgtcaccgactccatccacgtggatgaagttgaccatggtaactaaatcgcttcaccaacaccaacagcagatacgatggtcttttctccaacaaccatacaatcgcctcctccgtggtgtttttagcagttatggatttttgcttagagggaatgtcgagcaacggaattttgttaacgctgctgcttggtgcaaaaataggcaaagtatcccgcaaaacagtcaaaaagtcaaagttttgtgcataaaacaatcttataactctcctttcaagataaaaacgcaaaaaaagacagctatcccaaaagggataactgtctaaataatatggtgactgagaaaagggtgctgctgcacctcattaaaaaatcttcgtaatgatagttctataataccatatatcgtctgaatgtcaagcaataaactcaatatattgcaattcattccctatacgaccgcatgacttgcagaacggcggccttttgtgtgtcggtcagcaccttccattccttcagcagttcccgcacctccggcgatacctccaccatttcgtcttgcgcgaagaactgcgccacggtgataccgaacgcgccgcataaggcctccaatgtggacacactcggaagtgtaccacggcggaaaatattagaaaccgtattgggcgacagcttcgcctcttttgcgattcgatagtccgaccaaccgcgctcctgctgaagctgccttaatttctgcaaaacgtccatacagcacctcacttgttggatatattatatcctcaagcatggtggtataaaaatagcatagttgtgacttgcatagcgcatagaatggtgatacactaagcacatcaatgcaacagaaagggaggaccttccatgaaaagaatcggtatactcttgctgacactggcgatgctgctttccctcgctgcctgtggggtgaaagatacgcagaccaccaacgccgaggagaaacagggcacggaacagactgcctcaggtacggcagcgaacgaaagccaacccgccgctgatctgcaaaagccagaggacaaaacgattacgccggacgctgctgcaaacggtgacaagcaggaagaaaccaagaccgatgataccaagaaggacgagcagaaccccgacacatccgaaaaggacgatgtaaagcaggatgagcaaaagcccgccacccccgccaaggacaccacgcctgagagcaaaaccgaaacgcccagctatggcaatggcagtctgaccaccagccaagtcaaggaaatgcagcggtggtatggtgtcagcgcagatggtcagtggggtgcaggctctgctaaggctgccggtgggcgcaccgccgatgaagcatgggcgtactaccagcagaacaagaaagacaccacgccggaggagacaacaaaacctgtggacaagcccgacgacagctccacaggcggcacgactacgcctcccacgcagactaccgaaccagcaaaacccaccaaggccgatgtggactgtgatgaagctatgcgcgtaggtaacgagtatgcagaaagcctcggatttgaagtttgggatggatgttctggtttctttcctcccacttattttgaggaagactatccctcttctcagtggactcaggagcagatgaatgcggctatgaaggaaatggttgattacgtaaaggcgcgttttgaaaaaaacggtcgttggattccccatgtggaaggaagagacggtgaggcgaccgccatcaactgtgttattcggtggaatgcggctggtggttatcacgaaatgtacgcctactatgctggttaacgcaaaaaggaagctctcagcttttgctgagggcttcctgctttttatatgtgttacatggctcgtccttggcactcaccttttactcacccttttgccggggagatacattgatttacatggacttatgtgagccaaaaagttttgaatttctcaaaatatggagatatatggacatttataaagatacttggcaggtggaaatgcccacgatacccagcttcataaggtgagcctcctttgtatttctgtccggcgcagggggccggggaagttgtttttcaacttgatataataccattttttgcgtggaaacgcaagggcgggcgcaaaaaagtgcgccgcctttcgcacgaaaggcggcgcagccatatgtgttatgccaggaagcccttgaggatcgtctcctccgcctcctccggcgtcaggcccagcgtctccagcttcagcagctggtcgccggcgatcttgccgatggcggcctcgtggatcagttgggcgtcgggacagttggcggtgatggccgggacggactcgatgcgggcgtcacccatgatgatgctgtcgcactgaacgtggccgaagcactgggcgttgcccaccatcaccgggtggaagatctggtgggagtcgtcctgcgccacggagcgtgagataacgcggccgcgggcgtcgtggccgttgagctcgatacgcatatcgctctcggcctcctgcgcgccgtgggtcagcaggcgctcggtgaccaccacctcgctgccggcttcgcagaagaagtccgtctcgcgcttggtggagtcgatgccgcggatctggatcgtctccatctgcatggtggcgttctcacccaggtagaccacggtcttggggttcatgatgttgccgccggtctggccggggtctttctcgccgaagtgcttttccacatagcggaccttggaatttttgccgatgtggaaggtgtggatgccgtcgtggcggctttcgtcacagccggagttgtggatgccgcagccggcgataatgtccacgtcgcagtcgtcgcccacgtagaagtcgttatagaccagctcactgaggccgctgtggctgatgatgacggggatgtagcatttctcacccttggtgccgggcttgatgcggatgtcaatgccggactttccgtcgctgcggggatcgatagcaatatgctcggtggactgacgggcctcgcagccggagtccttgcggatattgaaggcgcccacgggcttgccggtcagatcggcgatcttttccagcaaagcggcgtcgatatcggtgatcattgcgcgccctcctttctatccagtacgggacagctgcccagcgtgtcggccaggatcagggggaagatctcctccgtggtgccgcggtgggcgatctggccgccggcgatgacgacgatctcgtcggccagcttgataatgcgctcctgatgggagatgatgaccatggtggccgcgccctcccggtggatctgctcgaaggtctcggtcagccgggcgaaggaccacaggtcgatgccggcctccggctcatcgaagatcatcagctggccgcggcgggccaggatggtggcgatctcgatgcgcttgacctcgccgccggacagagacacgtccacctcgcggtccaggtagtcgttggcgcagaggccaaccttggtaagataggcgcagcacttgtccttgctgagcttgtcctcgcccgccgccagaagcagcaggtcgtggacggtgatgcccttgaagcggggcggctgctggaaaccgtagctgatgccgcgcttggcgcgctcggtgatggacaggtccgtcacgtcctcgccgttgtacagcacgcggccggaggtgggctgcaccaggcccatgatgaccttggccagggtggtcttgccgccgccgttggggccggtgaagacgaccagcttatggtcggggatggtgatggatacatttttcaggatgtcctgctccccctcgggggtggacacccggtagcagatattctgcaattccagcatgggatggttctcccttctctgaacgtttgttttgtattgtggctgtccacaccagcaaagtggtgggcaggttccgtaaccatgtcagtgtaacagatttcggcaggaaatgcaatatgtttccgcccatggcgcacatcgggccgcggcaccacatagtatagacagaaaaggaggcgttcagtatggagccatcaccgttggtatacgataccgccgccgcggcggcggtgtggcagagggtggggccggcgctgccggcctatgatgcggcaccgtgtcccgcgggggcctgctgcccgctgccgcggcgggagacggacagcgaggcgatgctgggcgggctgatcgccgagggcgcggcgctgtatgccgcctgccgccggtgtgccgtccgtgcgccccggcagagccggcaggcgctggaacagctggcccgggaggagcagcggacggtgcgggccctgctggcggcatattttctgcatacgggccggtggcggcagccgcccgcgccggcggcgggggtacgggagacgtggctggcggccctgcggcgggtgtatgtgggtgaggcggtggtgcagcggggctgtgccgatctggcggcgcgcatggaggacggctgcctgcggcagctgctggcggcggaggcggatcgcgcggcggaacggggaaaacggctggcaaacttgttggaaaaagccttgacaacggagaataacctgctaaaatggtaggcaaataggaaaaggggcgtgccgcaccgggcgcgccaaattccggaagagcatcaagggggcgggcggcgcccgtctctggtatacaaaggaggctttacccatgaaagaatgtatctcccgcgaggcggcgctggcggcgctgaaaacgtacaacaaggagccgttccacattctccacggtttgacggtggagggcgttatgcgctggtacgccaatgagctgggctatggcgaggacgcggatttctgggccacggtgggcctgctgcacgacatcgactttgagatgtggccggagcagcactgccggaaggcaccggagctgctgaagaaggcggggtgctccgaggcgttcatccacgcggtctgttcccatggctacggcctgtgctgcgatgtggagcccacccacgagatggagaaggtgctgttcgccgccgacgagctgacgggcttggtcggcgcggccgcccgtatgcgccccagcaagagcgtgatggacatggaggtcagcagcctgaagaagaagtataaggacaagaagttcgccgccggctgctcccgggacgtgatcaacaccggcgcggagcgcctgggctggaccatcgaggagctgatggaaaagactatcctggctatgcgcagctgcgaggagagcgtcaacaaggagatggagacgctggcctaaacacggcagtacatggaaaaagaacaccctgtgcgaatacacagggtgttcttttttgcgaattatacggagagttgtggaatatcgtggaggggcggagggggtttacgccgctgcgcggctacaccttatccgccccctgcggaggcacctgtctccctgcgggtcggtcggtccgcggatctgacaggccaccggcctgtcattcaacactgcggacccctcaaggggaaggcttatgggggtgcgccctcggggggaaggctgacggggtgcagggggagaaaaaaggaagcacccgggcgggtgcttccctgtatgttattcgatggcgatgatgtagtagtacaccggctggccgccggggagggcggcgacctcggcgtcggggcagatcgtctcgaacacctcggcggcgcgggcggcatcgtcctcggtgacgccctggccggagtagacggtgacgaactcggcgttcttatcggcggctacatgagccagcttatccagcagcacgtccaggctgcggtcggtgcccaggagcttgccgtcgcacagggccagatagtcgccctcgttgatggcgaagccgtcgaagtcggagttgcgggcggcgtaggtgatctgggcggtggtgacgttggcggcggcctcggtcatggcggccaggatagcctggggatcgtcgttgtccgggtccacggccatcatggcggagatgccctggggcacagtggcggtgggcaccacgatgacctgcttttccgtcaggcccacgcactgctgggcggccatgatgatgttcttattgttgggcaggatgaacacgatctcgctgggggtgcggttgacctcctgcaggatggcctcggtggaggggttcatggtctgcccgccggagacgatgcggtccacggtcaggtcgcggaacacggcctcgagcccctcgccggcgcagacggccaggaagccgtagcgcttttccggcgcggccacagcggtctcgccgcgctccaactcagcctcgacggcgtccagatcgtcggtggactgggccttcttgccggcggccaggtcggcggcctgggtacgcatattctcgatcttggccagctccagcgtgccgtatttctgggcctcgttcagggcgtcgccgggggtgtcggtgtggacatggaccttgaaggcctcgtcatcctcgccgatgaccaggctgtcgccgatgctgttcagataggcacgcaggccgtccaggggcttgtcggaggtcttgcggacgatgaacacggtgtcgaaggcgaaggtaatgtcctcgtcgccgatggcggcgaagtccgccttctcctcggcggtatcggccacctcaggcacgggctcgccccgcagggcgcggagcataccctccagaatgatgaggtagcccttgccgccggcgtccaccacgccggcctttttcagcacggggttcatctcgatggtctccgccagggtggtatagccggtcttgatggcctcgtccagtacgaactcggcgtcgttcttctcgccggcggcctccagcgcacgttgggcggccaggcgggagacggtgaggaccgtgccctcggcgggcttcatcaccgcgccgtaggcagtggaaacgccctcctgcatggcctcggccagcagggcaccgtcggcggtgtcgtggcccttgaggaccttgctcatgccgcggaacagcagggacaaaatgacgccggagttgccccgggcaccccggagcaggccggaggccgtcagcttggcggcctcgtccacggtggcgggctcggccttgcggagctcgttcaccgccgtctggatggtcagggacatattggtgccggtgtcgccgtcgggcaccggaaatacgttcaggtcgttgatggcctgtttctgcgcggtgatgcaggcggcgccgaaggcgaccatctgcttgaaggcgccgccgctgatcttatctgtcatgtctgttctccttccgggcgcgtcacacggtgacggaatccacgcagacattcaccgctttgacggtgacgccggtgttgaggttgaccacatacttgacctcgcccataatggatcggcagactgtggcgatgttgacgccgttttccacgacgatgtgcagctcgatggacacggtgccgtcatcattgtacgtgaccttgacgcccttgctcatggcctcgggccgcaggagatgcaccagcccgtcagtcatgctgcgctgggccatgcccttgacgccgaagcagttggtggcggccgcgccggtgatggtggtgaacacggcgtcgctgatggtgatctcgccgttttcggtggggacttttatcatagcggacttcctttctgcggaaatggcataataacacacgataacatggagtattatatactacttcctccgggattacaatagagattttaccggggcggcatatgggcaggtttcccgcgcggctttgaaggcgcggcgaagaaagggagcgccccgcggggcgctcccttgtgcgttactgcttgtagggcacgtgccagatggtgtcggcgtactgggagatggcccggtcggcggcgaagacgccgctgcgggcgatgttggtgaggctcatgcggttccacgtctcccggtcgcggtaggtgtggcgcatccgggattcggcttcgcagtaggcggcgaagtcggccaggaccatgtactggtccgcctgaccgtccatgccggtgaccagccgctggaacaggtcctcgtaggtaacgccgtcccggaagcctaccttcagctggtccagcacgcggcgcagcaccgggtcgcgctggtagagcaggttggggtcgtaggtgtggcgcaggtgctccacctcatcggcatgaaggccgaagaggaacatattgtcgtcgcccagcaggtcgtgcatttccacgttggcaccgtccagggtgccgacggtcagcgcgccgttcatcataaacttcatgttgccggtgccgctggcctccttgccggcggtggagatctgctgactgacctcgctggcgggcatgaggacctcggccaaggagacgcggtagttctccaggaacaccacctggagccgatctttgcacagcgggtcgctgttgatctggtcggccagagaattgatgaggtggatgatgcgcttggccacggcgtagccgggggcggccttggcgccgaacaggaacgtctggggcgggaggtccaggctggggtcatcctgcaggcgctggtacaggtagatgatctgcagggcgttcagtagctggcgcttgtactcgtgaaggcgctttacctgcacatcgaagatggcgtcggtgttcagcaccacaccctggtgtttcctggcgaaggcggcaaaggcaagcttgttctgatgcttgatgtcctccagacgctgaaggaccgccttgtcaccggcgtaggcctccagctttttcagctcctgcgggtgggtgaggtagccctcgccgatcaggtcacggagcagtccgtccagaccggggttgatctggggcacccagcggcggtggtcgatgccgttggtgacgttcttgaacttgtccggcatcatctggcaggcgtccttgaacaggtccttccgcaaaatctcggagtgcagggcgctgacgccgttgacggccatgctgccggcgatgcacaggttggccatgcggacgccgccgtcccagataatggccagcttggcggtcttggcgggatcgtggaagaagtcctccacctgctgctgccagcggcgggagatctcctgcaatatctgccacacgcggggcagcagcgtttcgaacagctgctgcggccagacctcaagggcctcggaaagcacggtgtggttggtgtaggccacgcagtgggtggtgatgtgccaggcctcgtcccagcccatgccggcatcgtcgatgaggatacgcatcagctccgggatcaccagcgtggggtgggtgtcgttgatctggatgacattcttctcatggaagttcctgagggtgccgtactgctggatgtgcttgcgggtgatggactgaatggtggcggacacgaagaaatactgctgcttcagccgcagggacttgccctcgtagtggttgtcctcggggtagagcacctggctgatggcgtcagccatggcgcgctcctcggcggcgtggaggtactggccctcgctgaagagcttcatgtcgatgggcttggggctgcgggcctgccacaggcgcagggtgttcacatggtcggtgtcgtagccggcgatctccatatcgcaggggatggccagcacacgggtgtagtcctcatggaccaccatcaggtggttgttgtcccagcgggtgcggaccttgccgccgaagcggacctcctccgcctcctgcagcttgggcagcagccacgcgtcgcccagctgcatccagtcgtcgggcagctccacctgctggccctccacgatcttctgcttgaaaatgcccagctcatagcagatggagtagcccgtcgccgggatctccagggtggtcatgctgtccagatagcaggcggccagacggcccagaccgccgttgcccagaccggcgtccggctccatgtcgaagatgtccgccgccttgaagcccagctcgccgatggcggcggtcaggggctccagcagctccagattgaaggcgtttttcatcaggctgcggcccatcaggaactccagcgacaggtagtggaccttgcgcttttcctcgtgagccgtctcctcgcgggtctgtacgccgtgctcggccatgatgtcccgcaggaccatggcgcaggccttcatcatctcgccgtcggtggcctgctgctcggtgcagccgtagttgaggcgcagcttctgcacgatggcctctttcagggtctctttgttgtaggtcatatcgggtaactcctccttgggtcaaaggttctcataaatgtgccggtaggccgccgcgctgcggccccagctgaagtccgcggtcatgccacggtatcgaacggtgtcgaagcctgtccggtcgccccggtacaggccggtggcctgaccgatgacggagagcatggccccggcgtcatagtcgccgaacaggtagccggtgccgtcctcctgccccacctggcaggagcgcacggtgtccgccagaccgccggtgctccgcacgatgggcaccgcgccgtagcgcatggcgatcatctggctcaggccgcagggctcgctgcgggagggcatcaggaacaggtccgcggcggcgtagacgcgccgggacaggtcctcggcgtacaggatctgggctgacacgcggccggggtactgccccgccttccagcggaagaagtcctcatactgcctgtcgccggtgcccagcaccacgaactggcagccggtggccataatgccgtccatggcctgctgcacgagatcaagccccttgtggcccaccagccgcgtcaccatggcgatcagcggcgtgtccggctcctgggcaagtccgagggcagcctgcagggatgccttgcacacggccttgccggtcgggtctgccgccgtgtaatgcgccggaagcgccgggtcggacgccgggtcgtaggtgacggtgtcgatgccgttgaccacgccgtgcattttccagccgatggcgtccaccacgctctccagcccctcggcataggccgggtcatggagttgggcggcgtaggtgggactgacggtggtgacggcgtccgccatgagcatggcacccttcatcaggttcacgtcgccgtccatgcggagggtgccgtcatcgtaccagccacgatccagaccgaagagctggtccacgctgtcgctgccgtagcggccctgatactcaatgttgtgaatggtgaacaccgtgcggatatggcgtatctcccaccagcgggtggccgcgtccttgagatagatgggcaccagcgccgtctgccagtcgttgcagtggaggatgtccggcatccagtccaggctgggcagcaggtcgacgaccgcgtggctgaaaaaggcgaagcgctcgccgtcgtcaaactcaccgtacaggcggccgcggcggaagtatttttcgttgtccacgaagtaccaggtcacgccccggtcatggagggagaacaggccgcagtactcatgccgccagcccaggtccacgtagatataccggcggaaggtcattttctcccgccactgggggccgatcttgtcgtacaggggcaggatgacggcggtctcgacaccctccgccgccagggcgggggggaggctgccggccacatcggccaggccgccggtcttgcagaagggataggcttcgctggtcacatacagcagcttcatggcaggctcctttctctcacaccgtcgcgcccttggcgatgacgatgggatagcgctcgtggcccatcagggtcacattctcgctgatggtgacgtatttgtcggtgatcacgccccgcagtatggcaccgcgcttgaccaccgtgtccttgaacaggatacagttttccacgctggcacccttttcaatacgcacgttgcggaacagcacgcagttttttgcgctgccctggatgtcgcagccgtcggcggccagagagttgacgcagccgccctccgggtcgatgtagctggagggggagtcgttttccttgccgtataccggacggtccgggcagaacagggcgctgcgggtggcggtatccagcagctccatgctgcggtcgtagtagttctgcagggtgctgatgtgggcggcgtagccgtcgtagacatagctttgcaggcggaggcggctgctcatgccctgaaggacatcccgccgcaggctgtaacggttgtggctcaggcactccgtcaccagctggatgagcagctcggtccgcaggacaaagatgttcaggcagcgatagccctccggcgtgtgcaggccgtaggccgtgtcggtgatgcggccccaggcgtccagccggaagtaggtgtcctgcccgtcgccggggacggcggtgcagacggcggtgatgtccgcgccggtgtcgatatggcggcggagcacgtcctccaggggcgcgttgatgaccgtgtcgctgtcggacagcaccacgtagtcctggcggatgctcttcaggtagttcatcacactgcccagggcatccacgcggccgcggaactggccgtcgccgcggtgctgctcattataggcgaaggccggcagcagcgtcagaccgccgaagttgcggctcaggtcccagctcttgccgctgcccaggtggtccagcagcgactggcacttgccgtgcatgatgacgcccacgtccgtgacgccggcgttcaccatgctggagaggatgaagtcgatgatgcggtagtcaccgccgaaggggatggagccgtggacgcgattttcgatgagctcccgcagaccgttttccttgtcgtaggagaagatgatcccgtgcattccgttcatggccgcacctccttgccgttttcgcccagcatcattttcggttcgatgaccgcgccgtccgccacggaggtccggggccccagcacggcgataccccagtcctcaaaggggacgctgcccggggcgccgcccaccacggcatttctgcctacgcggcagccctcgcccacgatggcgtaggacaccttcgcgcctgcctcgatgacggcgccgggcatgaccacggaataggagacggacgcgccctcggccacggtggtgccggtgctgaggacggcgttctttacctcgcccagcacggtgcagcccttggccacggcgctgttgcccacatcgcccgttttaccgatgtaggtgggcgggcaggtgggcgtgcggccgtagatgcgccacttcttgtccagcaggttcagcccggagccgggggagagcatatccatgttggcatcccacagggagtccagcgtacccacgtccttccagtagccctcgaagcggtaggcggacatcttctcaccgtttcgcagcatagcggggatgatgttttttccgaagtcgttgtcgctgcgggggtcagtctcatcatcgatgaggtactggcgcagctttttccaggtgaagatatagatgcccatagaggccaggttgcttttcggttccttgggcttctcggcgaactcggtgatgttgtcctcgccgtccacggccatgatgccgaagcggctggcctcctcccaggggacctccatgacggagatggtgcagtcagcgccggtggccttgtggcggcgcagcatcagggagtagtccatcttatagatgtggtcgccggagagcaccagtacgtactccgggtcgtacagatccacgaagccgatgttctggtagatggcgttggcggtgcccttgtaccagacggcgccgccggcgctctggtagggcggcaggatatgtacgccgccgttgacacggtccagctcccagggctggccgctgccgatgtaggtgttcagctccagcggccggtactgggtcagtacgcccacggtgtcgatgccggagttggtacagttggacaggggaaagtcaatgatgcggaatttgccgccgaagggcacggcgggcttggccatgctaccggtgagcacgtacaggcggctgccctggccgccggccagcagcatcgccacacactcttttttcatccttgcgtacctcctgtgttctgttttttctgggggcgttttccctcccggcgcagcagcaccgcgcccaagggcggaatggtcagggaaagggaagtctcccgcccgtgggaggggatctcgtccacgtcgatccggctgcccgccggaagggcgcagccgctgccgccccagcaggcgtcgtccgtgttgaacagcacctcataccgcgccgctgccggcacgccgaagcggtagttgtcccagggcaccggcgcgaagttcaccgcgcagatcagctcgtggcccctgcggtcccgccgcagaaacaccagcacattgttgtggttatcatcggccaccagccatgtaaagccgtcccagtcccggtcgttttcccacaggcaccggttgcgcttatacagccggttcagctgccgcaggcactcatggctggcccggcaggcgggatcgtccagcagataccagtccagctggccgcggaagtcccactcgtgccactggggcagctcgctgcccatgaacagcagctttttgccggggtggcacagcatataggcccagaaactccttacaccggccagctgccgccagtcgtcgccgggcatcttgccccggagagagcccttcatgtggaccacctcgtcgtgggacaggggcaggacgtagttttccgagaaggcgtagaccatggagaacgtcacgtcccggtggtggaactggcggaagtaggggtccatcttcagatagtggcacaggtcgttcatccagcccatgttccacttcaggttgaagcccagaccgccctgctccggcggataggtgaccagcggccacgcggtggactcctccgccaccatcagcgccgccgggtcggcggcaaaggctgcccggttcagctcacgcaggaagtcgatggcctccaggttctcccggccgccgtccctgttgggacgccacgcgccgccctgccggtcatagtccagatacagcatggacgccaccgcgtccacccgcagcccgtcgatgtggtattccttcaaccagtagacggcggaggacagcaggaattcccggacctccggcttgccgaagtcgaatacacgggtgccccagccggcgtgctcccatttcagggggtcgccgtactcgtagaggcaggtgccgtcaaattcgataagcccgtggctgtccttgcagaagtgggcgggcacccagtccagtatcacgcccagccccgcccggtgcagggcatccaccagggccatgaagtcgtggggcgtgccgtagcggctggtgggggcgaagtagccggtgcactggtagccccagctgtcgtccagggggtattccgtcaccggcagcagctctacgaagttgtagcccatggcctttacataggagggcagctcctttgccagctccacatagctcaggggagagccgtcctcgtggcgcttccacgagcccagatgcacctcgtagatcagcagctcgccgttcaccggcggctttttcagccgctgctgccgccagtcatcgtcccgccactggtatccggacaggtcgtagaccttgctgtctgtcccgggacgggtggccgcgtggaaggcacagggatcggccttccagaccacccggccgtccgcgccggtgaccacatacttgtaggcgtcgtagaccttggcgttctccgccgccgtttcccacacgccggtatccagccgggtcatgggccggggctgccagccgttgaagtccccggccagcgccacggcgcgggcgttgggcgcccacacgcggaaggtgaagccctgctccgccgggtgtgcgccgaggtaggtgtagatgtcgtgggccgggtgccgcgtcatgtgctcagctccttttctctcacgctgctcgtctgctctatggtagcacgcctgttccgtcaaaggacgcgaaacaggtcgctggtaacgttaccgacattgtaccccatttttcccgtcccgtcaacaaacaaggcgctttttgtgccgcggcgggggcggaaaagggccgcaagcacaaaagggaaacgcaggcgcgctgcgtttcccttttcgtttactcatcccgctgctgcacggcgctgctgccgttcaggccgaagtcgtccgctacgctggcggtgtcccggcgcagcatggtctccatcacccggatatcgctgtcgatatccatggcatcggtgcggtacagctcgtccagctggtgctcgaagcccgccacgatgctgtccatggtcttttcgatcttggccttggcctggctcaggttctcgccgctgacgccggcctcctcgaagctggcgtagttttccagcagcttcagggtagtgggcaggtagtagttcaggaacgtgccggcggcgtcacgcttggcctcgtcctcttcaatgagtttgaaaatacggccggacacctgctccatgcggtccagcttggcgctgatggcctcgtcggcgatgcggtcgttcagctcgcggatctgggccaggatggcggcgtagcccgccggcgcgggcgcggtctgtgcgggctgaccctgctccgccttggcgcggtgggcggcatcaaagtacgccgtggcggcggcctgggacttgaagagcataccgctgcccatgtcgatataggcctcgtcaccccagaggcccttttccagcatcaggttcacgtccttctccacccgacggcgggacacgtcggcggcccgggccagatagtccaggggcacggcctgcttctgcccgacggtgcggaggtaggtggcaaagcgccgctggcggcgcttcatggcgccgctgcccagcagcagggacgcgccgccggccatcatgcccaggggatagaacagctgccgggcaaagtaccaccactcgttgtagtggtaggcgtaggacaggttgtcgctgacggcactgagcatagccacgcagcccagaatacccagcaccgcgccgatgatcttcatggttttggcgcccttgtcggagtagttcggcgtctctgtgaccttgcggacggtgttcttcgccgcggaggcgcgcgcctgcgcaggcttcgcctcggcgctgcccgccgccgtccgctgccacgcatcccgcgcctgctggcgcattttcctgccgccgccctcgctgagcttgctcagcagcaggatcaggcccacaggccaggccacggcaaacatcaccgcgatgaatatccacgaacccaggtcgttattgttctttttcggcggcttcggctgaagaccgttgttctcgtcgtattcgtagctcatgcttccccttctccctttccccgcagctttcgcttgttgcccttctcgtccacgatataggtattctccagcacgctgcgggcattggccattaccgcgttcaggtactcctgccgcagtgcagcgcgctcctcgatctccacgtctgtcagcccctcggccttggccttgcgggccagctcgttgatgcgtgctatcttcttctcatccatagctgtttctcccttatatgtatcgccgtatggccaccggcaggcggccctttttcgtgggagcgcccacgctgtccaatacgcattttcccagaccgcggcaggtgatggtatcccccgccgacacgggcttgtccggcttcacacaggtgacgtagttcacctgtacggaccccttttccacggcctccgccgcccggccccggctgagagaaaatcccgccgccagcacgttgtccagccgcagggatggcaccgtgtcctttatttccttcaccgccgcatgggggaccgccagcgccgaaagcggcagcggcgttacggtgagcttctcccggtcggcgctgtcccagttctgcagcaggaaatccgtcatggacgggtccagcagcacctgacagccgcccttttccacaagtatatcgcctatcttctcccgggtcaatcccagagccatcaaactgcccaaaaaatcccggtgggtcaggtcgccgccgctgcggcacgcggcccgcaccgccgcgacttggtcgtcaggcgtctccagccagtccggcaggaacaccagccgccggcgctccgcgccgtcatagccgccccaaagcacatagccctcccggcaccccagcgcgttcagcagatgctgcgccgccgtctgttcctggggcgagagaaagccggtggccgtgggaatgttccgcgtgcggcactgctcacacttatcccacacgcggctcagcagcagccgttcctccgggctgtgggcggctctgtccagcagttctcgtctgtccatgttatgcctccaaattctgcgtgcggtacagtgtggcgtacacgccgttcttcgccaggagttcctggtgggagccctgttcggcgatgacgccgtcctgtatcaccagtatccggtcggccgaacgaatggtggacagccggtgggcgatgatcagtgtcgtgcggcctcgggccaaacggtcaaaggcgccctggatgcgggcttccgtcacgctgtccagcgcggaggtggcctcatccagtatcagaatgggcggggccttcagaaacacccgggcgatggccacccgctgcttctgcccgccggagagcagcgcgccccgctcacccacataggtgtcgaacccgtcgggcatggcgcagatatcatcgtagatctccgcctgccgcgccgcctgctctacctcggcgtcggtggcgtcggggcggccgtagcgaatattctcgcggatggtgtcggcaaacaggaacacgtcctgctgcacgatgccgatggcccggcgcagggagcgctgggtgacggcgcggacatcgcggccgtcgacggtgatgctgccgctgtccacgtcgtagaaccggggcagcagctggcacagggtagtcttgccgccgccggagggccccaccagggccaccgtctcgccggcggggatgtgcagcgtcacgttgtgcagcacctcggccttttcgccgtaggcgaaggagacgtcgttcacgtccacgcggccctgtacatgttcgaggggctgcgcgtccggcgcgtcctggatggacggctcggtggccatcagctcaatgaagcggtgcaggcccgcgaagccgttggagaacatctcagcgaagttggccagcttgcggatgggactgacgaaggcggtgacgtatagggagaaggtgatcagatccacatagtccattttctcccccatgatgagccagccgcccacggcgatcaccgccaccggcaatatgccggtgcagaactccatcaccgcgttgaagcggcccatctccttgtgaaagccacgcttggcggtcttgaacacctcgttggcctcgtcgaaccgctgctgctgggcttcttcgttggcaaaggccttggtggtccgcacgccggacaggccggactcgatggcggcgttgatggtgccggtcttgaccttggcagcccgggaggcggcgctcatctgccggcggcggcgcagggccatggtcagcaggacaggcagcagcaccagcagtaccagcgccagctcccagcgcagggtgaacatcaccgccagcgcgcccacgatggtcaccagggagatgaacagatcctccggcccgtggtgggccagctccgtcagttcaaacaggtcactggtcaggcggctcatcagctggccggtgcggttgcggtcgtagaagtcgaagcccagctcctgaatgtggcggtacagatcgcggcggatatccgcctccacgcggatgccgaaggtgtggccccagtaggccaccacgaagtacagcgccgagcgcagcacataggcggccaccaccaccgccatgacgatgaagaatacccggaactgccgctggggcagccaggtatacatggcggcgcgggacaccagcgggaacgccaggtcgatgcaggcgatgaggaacgcgcaggacaggtccagggcgaagagccgccggtggggtttgaagtaggagaggaatatccgcagggggctgcgggtctgataatctttcgtggtcatgctatgcctcgcttggtgtttttttgaacatatagtatagcacatcggcacggcgttcgcaatagcacggcgccccggcttgcgtgtcggggcgctgcgtgttataattgggccatgacctggccgatagggccgtcgatggtgacggcggcgccaagaccgctgccggccccgcccttgttgatgaccgccagcttatggccgcggtagtactgtatcagcccggcggcgggatagaccaccagcgacgtgccgccgatgatgagcacgtctgcctgccggatatagtggatggcgcgggccatcacgtcctcatccagggactcctcatacagcaccacgtccggcttaatgatgccgccgcaggtgcagcggggaatgccgcggctctccgcgatgcgctccacaccgtagaatttcccgcagcgggtacagtggttccgcagcacgctgccgtggagttcaaggacctcccggctgccggccttctggtgcaggccgtcgatgttctgggtgatgacggccttcagcttcccctgccgctcccattccgccagcttgcggtgggcggcgttgggctgggcgtccagggccagcattttggcccggtagaagtcgtagaattcctcggtgtgcgtctcgtaaaatgtgtggctgagcatggtctccggcgggtatttgaatttctggtgatacaggccgtccacactgcggaagtccggtatcccggactcggtggatacgccggcgccgccgaaaaacacgatgttgtcactggcgtctgtcagttctttcagtctgcggatggtgtcgtccatactgtccctccatttcttttgtaaggagcatacgctatgaatattcagatcttcggaaaaagcaagtccttcgacacgaaaaaggcggagcgctggttcaaggagcgccgcatcaagtaccagtatatcgaccttgtgagcaagggcgtatcgccgggggagtaccgttccatccgggcggccgtgggcagcttcgacgcgctggtggacaaggactgccgggcgtatgaggcgctgtacatggcctatatcacgcctcaggcggcggaggaaaagctgctggaatacccggagctgttcgccgcacccattgtccgcaacgggaagcaggccaccgtgggctattgcccggagatatggcagacatgggaataggaataagggctctcatccgtgcgccgcaggcgcacggtttttttcgggcagcaccgcggctttcgctgtgcggtgttgcccttagtccgtgtagctgtgctccaccgtgaccacggcgtagtaattgccgtccatggtgcggaccagagcgcgtatctcctgcgctgcctgggctggggtcttgctgctggagaagggcagcaccgcgtcgaagatcaggttatcgtgtgtggtgccccggaccacgcggaagtcgtggatggtcagaccgggatccacctgcttcaccagcgcggccacctgttccttcagtgcggtgacggagccgtcggtgacgatggggtccatgtggatgacggcgtggcagtggagcttctccatcagttccttttcaatattgtcgatcacatcgtgcatggccatgatgtccccgtgggcggggacctccgcgtggagggtgatcatcagacggccggggccgtagtcgtggaccaccagatcgtgtacgcccagcactgtgtcgttggagaggacgatatcccgtatctgctgcaccagcgccgggtcgggcgcctgccccagcaggggggacagggtctcttttgcggccttgtaggcggagaacaggatgaacagtgccaccaccaggcccacatagccgtccaccgccagaccggtccatttgccgatgagcatggcaaggagcaccgccagggtggagacggtgtcggaaaggctgtccgtggcggtggcctccatggcggcggacttgatcttccggccgacggcccggttgtacagccacatatagaccttcacgcacacggaggcggccatgatggcgatagccatcagggagaaggtgacggcctccggatggaggatcttgtcaaaggaggacttggccagctccacgcccatcagcaggatcaggcccgctacgatcaggccggatatgtactcgatgcggccgtggccaaaggggtggtcggtgtccggctttttgcccgccagacggaagcccagcagcgtcaccgccgaggagccggcgtcggacaggttgttgaaggcgtccgccgtgacggcgatggaaccggacagctgtccggcgaagaatttgccgatgaacagcagaatattcagtgcgatgcccacagcgccgcacagggtgccgtaggcgcggcggacggcgggggaggacacgttgtcccggtcaggaatgagccagcggctcagcaatcgtatcatagcagtcgtctcctttcggcgggtagacccggcgctttgtcagccaatagcacagagggatggcgtacagcagtatctcgtaggggatggcggacatgtccgcgcccagcatggccagcgggatggacacggagatgttccaggggatcagcggcgagagaacgatgccggagttctcgatgtcaagggccatctcgcccctgccgtggccgcgcttggtgtagtcgtcctccagcagctggttgcacaccaccgcgcaggtggactggttgcagaacaccatgctgcacaccacggagatcgccgcgcaggcggggaaccgcccggctctccgggccaggcgctgggccagatgcgccgcgccgttcagcacgcccatgccgcccagcagcccggcgtacagcccggcgctgacggccatgatggtggccgagaccatggacatcatgccgccgccggagagcacgtcgtgcagcgcgccgggggcggggaggtagcccagcaccgcatcccgcagggtgggcagcagagcgcggccctgggcgaacaccgtcaccagcagcgccgtcagcgcactgacggccatggtgggccggatggggaccttgcacagcggcaggatcaggatcagcagcgccgggatggccgtccaccagctgaggctgaaggtgccggacagctggtccagcacaccgctgtccaccgtggccagcgggtgcgttacggacagggcagcgtaggccgcaaggctgaccagatagggcagccagccggtgcggtgcatcatgtgcaggttgtcatagagcttggtatcggtggcggcggccaccagcgtggcgctggaggaggccggcgagcagcggtcgccgaagtaggcgccggccacgatggtccccgccgtgatggccacgctgacgccgccggagcgggccaaggccatcaggatcacgcccagggtgcccaccacgccgaaggacgtgcccagggcgtaggagatgaagctggtcagcaggaacgtcaccagcaggaacagctgcggcgtgatgatgcgcagcccgtgatagatgaagaaagcgatggtcccggcgctgcgccacagggcggtgatggcgccgatgagcatgtagatcacgatcacgcagcacattttgcggccctgctcccaggcggcgtcccacatggcccgcacggtcatcccgcggcgcaggcccagggcggcgaaggctgctatgcccacccatatcgcaagaatcagggactggcccaaaaggatgcagagacccactgcggccagaaacagcagaaaacagaagacagcgcccatgttacctccccgggatggtcagcgtcatgcggcagcacagatcatccaggtcgctgtcggtggcggcgggaaggcgcaggcgtcccccgcatttggcacaggtcaggtccaccgcgccgcggcgcacctgcatggtgtattcgtggctgccgcaggcgcaggcgatgccgccccgggcggcgatatccttcagctcggacagtacctcatacatgatgacgttgtcggtgaaggcctcatcgggggacgctttttccttggccacccgcagggccagaccctccatggcctttcgcacctgggcctcctcgccgatgtagcagcacagctcctgttttaccgggcaggccaggccaatgccccggccgtgcagcaccgcaccggcgtcgcactccgcctggtggtgcccgccgcacacgccgcagggcacgttcagccggaagcgcaggccgtccgtctcggcggtcagagcttctttgccgcattcgcattccatccgcgccgcggcggcgttcagggcgaaaacgctgcggctgtgcagcaccgctttgccgcaggccggacagatatatccaaagctacgcatttcttccatgacatacgctcctttgtcaaccaaaagtcacaacaagttcctgtattatataccatttattcgctgttttccagtattgcgggaaaaagagttttacattataatggcgccgttatcccacgcttcaaaggatgtgataccgtgcagaacaggagctttgccgcggcggtgaaggcggcgtttccccataccatccccattatgaccggctatctggccgtaggcatggcctacggcgtactgatggcctccaagggttacggcttcctatgggccggctttgtcagcgcctttgccttctgcggcagtatgcagtatgtggccattacgctgctgaccacggcctttgatcccctacaggcctttgtgctgagcctgatggtcaacgcacggcacctgtttttctcgctggcgctgctgcccaagtaccgggggctgggcaggctgcggtattttatgatctataccctcagtgacgagaacttttccctctcctcctcggtggagccgccggaggacacggaccccacgctgttctactttgccatgagcttcctgacctggctgtactgggtggcgttctccatgctgggtggcctgctgggcgggctgatcacctttgacatcaccggcatcgacttcgccctgacggcgctgttcgtggtgctgttcatcgagcaggtcatcaagaaagagaaccgtgcccccggcgctgccggtctggtgtgcgctgtggcgggtctggccgttttcggcgcggacaacatggtcatcccggccatggtgctgaccctggcggtcctgctgctgggaaggaggaagctatgcgcctagacacgatacattccctgatcatcgtggcgatggtggcgctggccacccagatcacccgatggacgccgttcctgctgttctctggggacaagaagctgccaaaggtggtggaggacctgggcaggctgctgccgccggccatgatgggcctgctggtggtatacagcctgcgcagcaccgaccttctgggcggcagccacggtattccggaggccatcgccgtggcggtgacagccgggctgcacctgtggcggcggaacacgctgctgtccatcctggcgggcaccgcctgctatatgctgctggtacaactggtgttttgaagatctgtgaaagcgccgtcccgcgggacggcgctttcatatttttccgtaaatggtgcacactacggccaatgctatgtttgcgaggtgcgtatcatggacgtaaaacgcttgagccggcagacctgccggtttttgcagccgccgggagtggtcagctttgcggcggtggcgggaaagctggagggcgaggggccgctgggcggctgcttcgacgctgtggggacggacgccttctgtgggaaaaagacctgggaacagggcgaggcacagatgcaggcggatgccctgcgtctggccctgcaaaagggcgggttggcggcggaggacgtggactgcgccttcgccggggatctgctgaaccagaacattggggccacgtttgccctgcgggatttcaatattcccttctatggggtatatggggcctgctctactatgggggagacactgtcgctggccgctatggccgtggcctccggcgcggtccgtatggcggcggcgcagacctcctcccacttctgcacggcggagaggcagtatcggatgcctctgccctacggcagccagcgttctcctactgcccagtggacggccacggcggcggggtgctgcattctgggggcccaggcggagggaccgtatatcacccatgtgacccggggacgcatcgtggatctgggcgtgacggacatgaccaacatgggcgcggccatggcaccggcggccttcgacaccctgcaggcggtgttccgggacaccggcaccgtacccggggactatgacctgatcctcaccggcgacctgggcgatgtgggcagccgcatcgtgctggagctgttcgcccgggaaggcgtgacgctggagaattacaccgactgcggactggtgctctatgaccggaagagacaggatatgcacgccggcggcagcggatgcggctgctctgcggcggtgctctgcggttatctgctgccggagatgcgccggggccggtggcggcgggtgctgttcgcccccaccggggcgctgctgagccccaccagttcatttcaaggggagagcataccgggcatctgccacgcggtggtgctggaccggacgaaggaggatgcgtgatggagtatctcaatgcctttctctgcggcgggctgctgtgcgccgtgggccagatcattctggacaagacaagcctgaccccggcccgtattctgacgggctatgtggtggcaggtgtgctgctgcaggctgtgggtgtgtatcagtatatcgtggactggggcggcgccggggccaccgtgccgctgacgggctttggctattcgctggcaaagggcgtggccaaagcggtggcggaggacggcttgctgggtgtgctcaccggcggattgaccgccacctccggcggcatcgccgcggcggtagtgttttccctgttggcggcactgctggtgcggcccaaagaaaaacgttgacaaatacccggtgggggtatataatgcgaccgtgatcaaaaatacccccaggaggtatacgactgtggaaaatacttgttgctgctgccagggaaagaccaagcaccgcacaccagaggagcagaaaaaactcctgaaccgcctgtgccgcattgaagggcaggtgcggggcctgcaggagatgctgcagaaggacgcctactgtcccgacattctgatacaagtatccgccgtgggcgcggcactgaacagctttagtaaagagctgctggctacccacatccgcacctgcgtggcggatggtatccgacagggggacgacgaggtcatcgacgagctggtgaccacgctgcaaaagctgatgaaataaggagatggcagtatgacagagaaattcgtcatcaccggcatgacctgcgccgcctgcgccgcccatgtggaaagggccgcggcttcggtgcccggcgtacacagcgcgtcggtaaatctgatgctgggctccctggtgtgcgacagggacgaaaatgtggatcccgccgccattgtggccgccgtgacggcggcgggctacggcgcggcgccggagagtgaggcccggcgggacctgcacgcggagcaggacgccgcggtaaaggccatgggccgccggctgctgtggtcggtggtgtgtctggtgccgctgttttacctgagcatggggcacatgatggggctgccggtgcctatgttcatgcacacgcggcccctgctgtcggcctttgtgctgctggcgctgacggtgcctatcctgatcctgaaccgcagttatttcaccgtgggattttcccggctgttcaagggcgcgcccaatatggactcgctggtggcgctgggcgcggcggcggggctggtgtacagcctgatcgagatgggcctgctggcggcgggaaaggtcacgggtatgccggacctgtacttcgagtcggcgggtatgatattggcgctggtgacggtgggtaagtacctggaggagcgctccaagggcaagacgaccggggccatcaccgccctgctggcgctggcgccggagtccgccgtggtgcgccgggacggcaaggaggtcaccgtccccaccgaggacatcaaggccggcgagacggtcatcgtccggcagggggggcgtatccccgtggatggcaccgtgacggcgggcagcggcaccgtggacgagtccgcccttaccggcgagagtatgccggtggagaagactgtgggcggcaaggcggtgtccgccaccatcctcaccggcggctatctggagctgacggcggaccgggtaggtgcggataccactctgtcccagatcattcagctgatggagcaggccgccagcggcaaggcacctatcagccgtctggcggataagatcagtgccgtgttcgtgccggtggtcatttccatcgcgctgctggcggctatcctgtgggttgcggtgggcggcatgggtgtgcgcttctgcctgtccatcgccatcgccgtgctggtgatctcctgcccctgcgccctgggcctggccacgccggtggccatcactgtggctacgggcaaggcggcggagcagggtattctggtaaagtccgccgccagcctggagctgatgggccgggtggacgcggtggtgctggacaagaccggcaccgtcaccgagggtaagccccgggtgacggatgtgctgtgcgccggcggcatggacgaggacacgctgctgtccgccgccgcgtcgctggaaaagccctccgagcatccgctggccggggccattgtggccgaggcggaaaagcgcggactggccctgcggccggtgtccgactttgccgccgtggccggcggcggtgttgccgcccgggcggaaggtacattactgctggcgggcaacgaggcctttatggaggcatccgcagtggccgtcagcgaggagatgaaatccggtgcggccagactggcggaggacggtaaaacgccgctgtttatcgccgcaggtacatcgctgctgggggtcatcgccgtggcggacgtggtcaaggcggacagcgccgccgccatcgccgccctgcgggagatgggctgcgacgtggtgctgctcaccggcgacaaccagcgcacggcggacgccattgcccggcaggtgggcgtcagccgggtcatcgcccaggtgctgccccaggacaaggcccgggtggtgcaggaattgcaggccgagggcaagagggtggccatggtgggcgacggcatcaacgatgccccggcgctggtgacggcggatgtgggcctggccatcggcgcaggcacggatgtggccatcgagtcggcggacatcgtgctgatgaagagcagccttatggatatcgccgacgcggcagccctgtcccgggccaccctgcggaatatccgtcagaacctgttttgggcgttcttctataattctgtgggcatcccggtggcggcgggtgtgctgtacccggcctttgggatcaccctgaaccccatgatcgccgccgcggccatgagcctgagcagcgtgtgcgtggtcagcaacgccctgcgtctgcggggctggaggggccgcagacgggaggaaacgccgactgcaaaagagccacagctggtgcaaaatataaataataacgaaagcagtaaggaggataccgctatgaaaaagaccatcaccatcaagggcatgatgtgtgcccactgcgtctcccacgtggagaaggcgctgaccgccttgggcgtacaggcggacgtggatctggcgtccgggaccgccgtggtcaccggcaacgccagtgacgaggcgctgaagaaggctgtcaccgacgccggttacgaggtcgtggagatcaagtgatgcaaaaaagagcacccccgcaaggggggtgctcttttttatgcgcttttacgcggcaccgtcagtctcggtttcctcgacaacgggagcggtctgcgcggcggtgcgggtgacgctgtcggcggtgaggatggtgccctcgccctcagcgtaccgaatggcgacgctgtcgcctacattgaagatgaccacctccggctgctgcgcggcggagatgacgtagtagtgctcgtcaccggtcaggtgcaggtagtagagggtattgccgtccaccacggcggagcggatatcctccagcacaccggtgacttcgttctggcccgtcaggggcagatcggcgtcatcggcggataccagacctttctccgccaggatgcggcggtagttggcctcacactgggccaccgtgtcgccggtggccacgatctggtactggctgacgttgaccatggcgtacatcttcaccagctcggcggcgtccttcagcgccatgaaatacgtgggctggtcggagatattcagcagcagggggaaggtggcggtgtatttcatctgttggacctgcccctgggcgctgtccatggcggagtactccttggcgccggccaccagatagaaccgcgtctccttggtgcgctggttggagagaatgaagccgatgttggactcgtcggacaccacggaggtgacgccggtgtacatatacacgtcgtcaccgatggcgatgtagttatagccctcggtggtgacggtcacgtcccgctggccgaacagggaattgatgaagccgttgacatacgcgccgtggtagtcgtactgctgcatgatcagctcggcggtgtagacgtgatccacccagttgggcacgtcgccggtcttgtagtaggcgctctcgccggtgacggcgttcaccagcacggcaccgatgatatcacggccgccgaacaggccgatggtgtggctgacacgggggcagacccaccacgggtcgccgttctcgtcgatctcaaaggccggctcgtcgaacatataggtggggtagtggaagcgcagatggcggtacaggttgcggctgaagtgctcggcggtggtgtagtggatgccctcgtccagacggatgacctccacgttctgagtcaccatgtcgataagcagataggcgggcaggccgtcggcgcggttgttcagccatttgatgatatcgccgtagcgcaggggcgtgacgcggacagggcggccctggtagttgatctgggtgtagtcgtcggccacctcgaactgggagaccatgtccgccagctcacccaatttgcggttgcccagctttgtggcggagttggcatccagcatggggatctggtcatagctgatctcctccacctccgcggcaaagtcgccgtcggtaacggtcagcaggtcgcggtagtccccggcgcggaacagctgccagccgatcaccgcgcccaccagtgccgtgacgatcagcgcggcggccgcaatgagtggcacggtgcactgttttttcaaaaaggtgaagtagcccttggcaccggtgccctgaaaaccggaggtcagtatggcacagccgccgtacacggcgcacaccagcagtacgaagatgtagaaatcctcacttttcagactgatgggcggcaggacgatgtagaaatacacggcggcgaacaccaatgtgacggcgatgttcagcagcgtgcggcccaggggcgtgcccacggctttgcgttcctttttcgggcggggctggcggccgaagccctgaaagttggggtcgttccaatttgtattcttcatagacggttcctttctctgttgatatgcctgttggtactattataaccgatgtagcttcgtttgtatagcaacttcaggttgcaaacggcaaaattgccgcagagagatgcatttggctgttcacaaattgtttacaataaaagtcaaagaaagtcaaattaccatattgacaaagtaggaaaggcggtgtaatatatgctcaaggtcaaagaaaggcaaagtcaaatgagccgagcttgaccgagagatgcaaacgaaaggcggcgaggatttgggtatttccgatattatcgctggatttatccagcaggagttagaccaggcgggcggtgcgctggagctacagcgagccgacctggcgcagcggttcaactgcgtgcccagccagatcaactacgtgatgtccacccggttctcgccggagcatggctacatcgtggagtcccggcggggcggcggcggctacatccgcatcacgcgggtgcaggtggaccgccagacgctgctgatgcacgttatcaacagcatcggcgacaggctggacgcggccagcgcacgggcgatcgcccagaacctggtccagtccgaggccatcagccgggagctgggacaggcgttgctgtccgccaccggcagccgggctctgcagagtgcctctccggagagccgggatgccctgcgggctgacatatacaagcaagttttgatccattccgtctgatgacggcgtaaggaggttatgattatgaagtgtgatcgctgtggaaagaacgaagcgacgttccattataagaccaatatcaacggcagagtgaccgaggcgcacctctgccccgactgtgcccgggccatgggctatgccggttccatgtccggccgcatgagcagctggttcgacgatgactggttcgaccgtccgttccgtatgctggagccgtttttcggcggcttcggcagccggatgctgacggagttccctcagccggtggacgtgctggagcaggcgcagagcgccggcccggagagcagcgccgccgaggagctgctgccgaaggacgaggctatgtctctggcgctggagcgtaggcgcaacgcgctggagacgcagctgcacaacgcggtggcggaggagcgttatgaggacgccgcccgcctgcgtgatgagctgaaggctctgggcggcaaggcgtcctgacgccgttccgctatgttaaaataacaaatcgaaaggaagtgttcctttatgtctgagaataaatttaccccccgtgcagaggaagttctgcgtttgagccaggaggctgccgaggatctgggccacggctatgttggctccgagcatctgctgttgggcctgatccgtgaggaggagggcatcgcccaccgcgtgctcagtgagttcggcgtcaccgatgaaatggtctgctccgtgctgcagcgcagcgtgggcaagggcgtttccggcgccgcgcccagtcagggcctgacgccccgcgccaagagcgtggtggagctggctgtgtccgaggcgtcccgcatgggcagcggcgccatcggcaccgcccatctgctgatgggcctgctccgtgagggcggcaacatgggcctgcgtatcctgcgtaccgtgggcgtggaccccaataagatgtacagcgctgtgctgaagaagctcaacgatatgccccgggctgccgctggcggtgcctctgcccctaaccgcgaggcggacaagaagaacaagacgctggccgagtacacccgcgatctgaccgaggccgcccgcagcggcaagctggaccccgttatcggccgcgataccgagatacagcgggtcatccagattttgtcccgccgcagtaagaacaaccccgtactcatcggtgagcccggcgtaggcaagactgccatcgccgagggactggccgagcgcattgccgccggcgatgtgcccgaggagctgctggacaagcgcatcctgtcgctggacctcagcggcatggtggccggaaccaagtaccgcggcgagttcgaggagcgcatcaagaacaccctgaatgaggtgaagaaagacggcaacgtcatcctgttcatcgacgagctgcacaccatcgtgggcgcaggctccgccgagggcgccgtggacgccgccaacatcctgaagcccgccctgagccgcggcgagatccgcgttatcggcgccaccaccctgaacgagtaccgcaagtacatcgagaaggatgccgcgctggagcgccggttccagcccgtcaccgtgggcgagcccacccccgaggccacgctggagatcctgaagggcctgcgcgaccgctatgaggcgcaccacaagctgaccatcaccgacgaggcgctggacgctgcggtgcagctgtccaagcggtacatcggcgatcggttcctgccggataaggccatcgacctgatggatgaggctgcctcgcaggtccgcatgaccgccgagagctcctctccggacctgaaggccctggaggagaagatcaccgccctgcaccgggagaagaacgatgccatcgccgcccaggacttcgagaaggccgcgcagctgcgcgatatcgagaaggactaccaggagcaggtggacatcgagcgcgacaagtggcgcaagagcctgtcccagaaccggggcaccgtcaccgcggacgacatcgccaaggtggtggccggctggaccggtattcccgtcacccgcctgaccgaggatgagtccatgcgcctgctgaagctggaggagaagctccaccagcgtgtggtggggcaggacgatgccgtgaccgccgtggccaaggccattcgccgcagccgtgtgggtctgaaggaccccaagcggcccatcggctccttcctgttcctgggccccaccggcgtgggcaagactgaactgtgcaagaccctggcggagtccatgttcggcgacgagaacgccatggtgcgtatcgatatgtccgagtacatggagaagcacacggtgtcccgcctgatcggctcgcctcccggctatgtgggccacgaggagggcggccagctgactgagaaggtgcgccgtaagccctattccgtggtgctgttcgatgagatcgagaaggcccacgaggatgtgtggaacatcctactgcagatcctggaggacggcgtcgtcaccgattcccagggccgccgggtggacttcaagaataccgtcatcgtcatgacatccaacgtgggcgcccggaacatcaccgatgccgccgccaagctgggctttgacggcgacgaaaagggcgggaaggaaactgaggaggctcgcttcgcccgtatccgcgaggcggtcatgaccgacctgaagcacaccttccgccctgagttcctgaaccgtatcgatgagatcatcgtgttccgtcagctgacccaggagaacatcgtggagatcgcccgccgtatgctcaccgttaccggcaagcgcatggcgcagcaggggatcaccctgatctccgacgatgacgccgtggccgagttggcccgtgacggctttgatccccagtacggtgcccgtcctctgcgccgggccatccagaaccaggtggaggatgccgtagcggagttgatgctggagggtaagctgaagtccggcgataccgcccatgtccgtctacgggacgacaaggtggtcatcgacagcgaggcggttcctgctgaagctgcgcctgcggcgacagcgcccgccgagacggccgctatccctgcggagaagtaaacaaaaaggaacgcccttgggccatggcccaagggcgttccttttttgtcctattgcttcttcgcgcggagagaaggtttacagggtgtccagcgcctgcttcaggtcggcgatgaggtcctcggcgttctccagacccacggacagacggatcaggccggcggcgatgccggaggcggccagttcctcctcggtgtaggtggagtgcgtcatggaggcggggtgctcgatcagcgtctcggcgtcgcccagagacacagccaccgtcaccaggtgcagggcgttcaccagcttcacgccggcggcacggccccccttgacctcgaaggacagcataccgccgaagtcacgcatctggcggcgggcgatgtcatggccgggatggtcgatcaggccgggatagtagaccttctccacggcggggtggtcatacaggaattccgccacggccttggcgttggcgcagtgcttctgcatacggatctccagggtcttcaggccgcggaggatcaggaaggcgcagaagggatccatcactgcgccggtcatatccttcaggccgaacatacgtacctcattgcagaattcggcggagcccaccacaaagcccgcgatcacgtcgccgtggccgttcaggtacttggtggcggagtgcaccaccacgtctgcgcccagctccagcggccgctggaggtacggggaagcgaaggtgttgtcgcagatgaccttgatgtccttgttgtagccgtgggccagtgccgccacggcagagatgtccgcgatcttcaggttggggttggcgggcgtctccagatacaccgcacaggtgttgggcttcagcgccttgcgcacggcatccaggtcggaggtgtccacaaagctgacctccacgccgtagcgggtcatgccgtggttcagaagggcgaaggtgcagccgtacagggtgccgtcggccacgatatgcttgccggcgccggctacggtccacagcgcggaggagatggcgcccatgccggaggcggcggccacgcaggcctcaccgctttccagggcagcgaccttggcctccagcaccgaggtggtggggttggacaggcgggtgtagatatagcccgcttcttcaccggcgaagcggcgcccgccctgctcacagctgtcaaatacgaaggtggaggtctggaaaataggggtggtcagtgcgccgtactgggtgtccttcacgtttccggcgtgaatggcttttgtaccgaagccgcaatccttgttctgcatgggtcgtcctccttgcactataatgtaacaataaagtgtacaggaccatacggccctttgccataagggtaacatatctgaacccgacggtggtaacggcaaaatgcgccagctcgctatcaattggaattgtagctaaaacagataatttcggaatatatttttgtgcagaatgctgtattgcggggaaatcgcaaaaagttttagcggaaattagacatcgtgccgaaaaatacagcaaaatggcggcggatttttgtcggggaacatgataaatgaaacagataacgatgggcgcgatttgcgggaaacggttgccatttccgccggaatgtggtataagagagacagagagtgcgcccggtgtccgccgggtacatgcagcttacaggaggtcatcaccatgaagaagatcattgccaccaccaatgcccccgccgccatcggtccctattcccaggccatcgactgcggcagtttcctggtcacgtccggccaggtgccctttgacccggctaccggcgagttcgtccccggcggcattaccgagcagacccgtcaggtactcaccaacatcaaggccatccttgaagccgccggtctgaccatggacaatgtggtcaagaccaccgtattcctgcagagcatgggcgacttcgccgccatgaacgcggtctacgctgagttcttcaccgaggggcagtaccctgcccgcagcgccgtggaggtcggtgcgctgccccggggcgcactggtggagatcgaaaccatctgcgtgaagtaagcaaagatctccgccgatataaaacggcaaaaataaagcgaggaagtccggcagggcttcctcgctttatttttcgtagcgtatcaggtcggcggcggtgcagtccagggcagagcatatcttttccagcacgtagctgtcgtagcggacgaccttgttcttatagtagttgtcgatgatggggtagcggatgccggtgcgcttggccagctcgtagcggctgatactgcgccgggtcagtacctcgtccagcgtcaggtagaccttgcccatgatacacctcctgagatattctgctatacattttataaagtgtatatgggcttgacaatttattcattggagtatatatttatataaggatataacgaaatatccaaaaaatgccaaaaataagaggagggcatttatgaaaaagttgttggcgactatcctggcgctggtcatggccatcggcgtcaccaccaccgcctgggcggatgatgagggaactactgcgaatatcgcaaaaatcggcgagaccgggtatgctacgctggcggatgctatcgcggcggcgcaagcggacgagaccatcgtgctgcaggcgaatgctgcgataaattccaacactcagatcacgaagaatgtgtccatcgatttgaacggcaaaaccgtgaccgtgacgactgttggcagtcagaacgcttttgaagtccagaatggggctacgtttaccattaaggacagcgggactggcggaaagcttgacttgggcaagtttggcattatgctgatgaactcgaaactcaagatcgagggcggcgagatcaaagtgagtccggctaaccccggcgcaggtgttgttgtggcagctatcggagactctgaggttactatgactggcggtaaggtagttgcgacgaacacggcctgcttcaatgccggctattttggtacgcagaccttcaatatttctggcggtacgctggagagtaagggcgcttctaccgcattgatgggtattagcaacaattacggtggccatacggaaatgaccatcagcggcgatacgcaggtggtgatgaaggatgctgcgggcaatgctggcagcttggtttctgatgcgacggacaccgatgtgatcaaagttgttggaggcacctccgatagcgatattacggcctatacagaagcgactgcgcctgttgttttgacgggtgatggtacatatcacattggaacgactgcggcaaacgcggctgtgcgtaatgcagcaagtggtgagacggttaccgttgttaagggcaatgcagctttgactgaggttcctgcgggtgtggtggtcgttcccaatcagggtactaccgtgacagtcaatggcgtgcccgtgaccggtgactcctacaccgttccccagccgccccgctactactacaactccaccactactaccaccgacaccaagaccgacggcaccaagggcagccccaagaccttcgacgccggtatgggcatctatgcagtcagcgctctgctgagtgtcaccggtatggcctgcgtgggcaggaaaaagttctgatctgctctcgacggcggtgcgctgccccggggcgcactggtggagatcgaaaccatctgcgtgaagtaaagaatccggcaaataaagagagccgccccttaggggcggctctctttatgcctcctggttcaattccgagacgatatccttcagaatggcgatgaacttctcgccgtagtccgtcagcggtacgtcccggggccgtatgaccccaaggcgcatatccggcacgtcgccgatcagcggcagcgtcatcagccggtcgtcgccgtagccgtccggcagtacgccgctgccggtggaaacgcagtccgtgtgggccatgacattgtaggccgtggcgcggtcgctgacggacactacccggtcaaactccgcgccggtgcccaccaccgcctcctcggcgaagtggtagttgctgtccgactgggtaaataccgcgtaggggtaggcatacagctgctccagccgcacggcgcgttcgccggacagggggtggcccttccgcagaaacacccgggggcggatgtccaccaaaggctggaacgtcaggttcttctcccgcaggatacggccgatgaaatgctctgtcatgtccgacacgaagatgatgccgacggcgctgcgccgcgccgtcacctcgtcgatgaccgctgccatctccatctccttgaagctcacctggatatgcggctcgtccagcaggtgcaggaactccacgaatgccttggcgcagaagggatagcgctgtgatgccaccgacagggatacccggtcggcagcccggcgctcactgtaatagcgctccagcttccggctgcgctccaccagcggtgcgatctgcgccgtcagctcccggccctcctccgtcagcgtcacgccccggttggtccgcagaaagatggtcacgcccagctcccgttccacctcggcgatggccgccgacagggccgactgagacagaaacaggttccgcgccgcccggttcatggacccgcagcggtccacctccaatatgtagctcatttgcagcaatgtcatcgcgccgcgcccctttcccaccgtttcttgcctttactataccaaaaaccgcgccccctgtaaatagaattgacagatatacggcccatcgtgtataatcgccggtgatataccgtatatattgctctatataggaggcgtactatgaaacgagttatcaccgtcctgttggcggtcctgctggtcctgtcactggcggcctgcggcagcggggtcgagacaaagaagctggcgggcacctggacgtgtacgatcgatgtgactgaccgcatgaacgcggcggcggagcaggcactgggcctgtccgcggcggacggcgcggcgaagatgccgctgcagctggtcctcaccgtgaccgaggacggcgcctataccctccgctacgacagcgacgccgcccgcacggcgttggatgcctatgccgcggcgctgcacccggcggcggtggagagcgtctatgccgccgcggaggagcagggcctctcccgtgaggaatacgacgcggccatggagaaggccggcatcaccatggacgatatggtggcggccattttcgccggggtggacgaggaggaactgctctccctgctcaccggccgcagcgccgcgctcaccggctattgcagggcggagagcggacagctgtacctggcggataccgccgccgaactggccgagacggcggactgcctgagctataccctttccgatgggaccatgacctggaccgacgcgcagggcgagctcagcagccagctgacggaacaggagcaggagctgctccgcgtgcccctgacttggacaaaacaggaggagagtaaataaaaaagagcgcccgcagggcgctcttttcctttgcctcatgtctcaaaaatccagctccgtgcgggtgcagacctccttgatcttggcctgcaggcgtttcagatcctcgaaagtctccggttttttccgggggtcccgcagcagggcggcggggtgatacagcgccatcatcaggcagccgtccttctcaaagaactggccgtgctcctggctgatcttaaagtccgggcggatgatctccatggcgctgacacggcccagacacacgatgatcttgggctgcatcaatgcccgctgccgctggaggtagcccttgcaggcgtccttctccgtgttcatgggatcccggttctccggcgggcggcacttaacggagttggtgatatacaggcggctgcggtccagcccgatcatcttcagcatatcgtccagcagcttgccgccccggcccacgaagggctcgccctgcttgtcctcgttagcgccgggggcttcgccgatgatcatgatctccgcatcctcccggcccacgccgaagaccacgttggtgcgcgtttccgccagtgtacaggcgtgacagtgcagacattcctgccgcagggcttcccactcggtcatagtcgtttctcctttatctctccgcgaacgggcttacttttccaatctggacagcagccacgcttcaatgttcttcgtaatatccgcagtgtatgccttttcgttgagtatctcatgccgcaggcccggatacagctttagtgtgcagtcccgcataccggcagcccggaaggcgtcataggtctggcgcacgcccttgccgcaattgcccaccgggtccttgtcaccagctacgaacagcaccggcatttccctgtccatctgccgcagatggctctgccgctggttgaagcgtatgccgtgcagcatctggcggaacaggcccaccgtggcgtccgcgccgcagagggggtcggcgatgtagtcgtccacgttgctctcgtcggcggagagccagtccaccttcgtgcggttgggggcgaacagcttgttgtagctgccgaaggccaactccgtcaccagctcgctggtggcgttctcgccgctgacggcggcgatggcattggccagcgccagcccgccggtgatggctgcccggggctgccagccggtgcccatgatgaccgccgccttcaccgtgccgggatagcggatcaggtatgtccgggtcaggaaggagcccatgctgtggcccatgatgcacagcggcacatcaggatagcgctgcttcagccgttgatgcagcacgtagatgtcatccactaccgtgttccaggtgttgccgtcgccgaaatagacgggggtgccgccctccggcagcgacttgccgtggcccaggtggtcgtgcccggccacgacgatgccctgttcgttcagcgcccgggcaaagccgtcgtaccgggcgatatgctcggccacgccgtgacagatctgcagtacagcgcggacggccacgccctccggctcccacagcatcccgtggagctgggtcttgccgtcgctggacagaaacgtgaattcactcaaatttgtcatggtgtatccgctcctttcatggtataattcttatcatcatacagtgtaccacaaaaatccggaaatgaaaagagggttcgccatgtcgcagtacatattggcactggaccagggtaccaccagctcccgtgctatcgcctttgaccggtcgggaaatatcgccgccctaagccagcagtccctgccccagcactatccccaggcggggtgggtggagcacgaccccctggagatatgggacacccagcgccgcgccgcggcggaggtcatcgcccggctgccggagggcagcgtggcaggcatcggcgtcaccaaccaacgggagacgacaatcctctgggataaggccaccggtgaaccggtgtacaacgccatcgtctggcagtgccgccggacggcggagctgtgtgaggagctgaagcgccgggggctggaggagcgcatccgctcggccacggggctgctgatcgacgcctacttctccggcagcaagatccgctggatactggacaatgtgcccggcgtccgccgccgggccgaacggggcgaggtgctgttcggtaccgtggagagctggttgatctggaagctcaccggccggcatgtcaccgactacgccaacgccagccgcaccatgctttttgatatccaccgcctggcctgggatgaggagctgtgcggcattctgggggtccctacggccatgctgccgcagcccgtgcccaacagcgccgtctacggcacggtgcagcccggtatcccggggctggagtccctggcgggcgtcccggtctgcggcgcggcgggcgatcagcagtccgccctgttcgggcagacctgcttcgcccccggcgaagccaagaacacctacggcaccggctgcttcaccctgatgaacgtgggcgaaaagcctgtgcgctcccgcgccggactgttgacctccgtggcctggcaggtggacggaaagaccacctatgccctggagggcagtgtgttcaacgccggcagcaccatccagtggctgcgggatgagctgggtatcatttcctcggcgccggagatcgacgtgctggccgccacagtgccggacagcggcggcgtggtggtggtaccggccttcacgggcctgggtgcgccttactgggatatgtacgcccggggcgcgatcctgggcgtcacccggggcacaggacgggcgcacatcgcccgggcggtgctcagctgtatcgctgcccaggtcacagacctgatgctggccatgcgccaggatgccggctgcgatattgcccttctgcgggcggacggcggggccagtgtttctgatgtgctgctgcaaatgcaggcagatctgctgcgtatccctgtggatcggccggagatggtggagaccaccgccttcggcgcggcggcgctggcggggctgagctgcggcttctggcgggatatggacgagatcgccgccctgcgccgcagccagaggatgttcctgccggagcgcccacaggcggactgcgacgcctattaccgtctgtggaaacgggctgtttcccgggccgctgactggatagagcattaagtaaacagtgtgtaaatttcgccatatagcgcttgcaaccgctgaaaaaacgcgctatactggcgtcaacaggaatatatgccgtgcactgtcccgcgtgtgtacgcggcgggagagccgggagatatggaaaggagctattatctatgggtattctcaatgacatcagcaagaaggcgcaggagtacgccggcatcgccgtggacaaggccaaggacctggccgaagtggccgcggacaaggcccagaccctcagtgacaccgccaagaccaatatggctattatgaacgagcagcgcgagctggagaagaactaccgcgccatcggcgagtggttcgtggcggagcaccagagcgacgtccccgacgccgtcaaggacgtggtggctgccgtcaacgccagcaaggagcgtatcgcccagctggaggccagcaagccccagaaggacgagccggcggtggacgagtccgaggtgaccttcaaggtctgccccgtctgcggcgccgccagcgacagcaagttctgccctcactgcggcgcgcctatgggtgagtaaaatacagaaaaaagaggaccgccgccggcggtcctcttttgcaagcgcttcataaaaaggaaggcccgcgagggccttccttttacttttcgttgggcatcttccagccgttgtggtcggtgtgcagcagatggtgggacttttcgcccagcggagctttcaggaattcccggtacagcgcctgcacgtccttgttccggtgggagaaccgcaccttggcactcttgtcgatgctccacaggatatcgccgcgatatgccgccagctcctgcccgtcgtgtatgggctgcccgccgccgccggcgcacccgccgggacaggccatcacctcaacgaagtcgtaatccacatcgccctcgtcgatggcgtgcatcagcttacgggtgttgcccagtccgctgaccactgccacgcggacgttgcccgcgccggggatggtgaatacggcctccttccagctgtccataccgcgtacggcggagaaggcgtccggcttcggttccttgccggtaatgagatagtacgcgctccgcagagccgcgtccatcacgccgccggtggcgccaaagaccaccgccgcgccggtgccggtacccagcggactgtcaaagggtgtttccggcagcaccgcgggattgatctgttcgccccgcagcatccgcacgatctcgcgggtggtcagcaccacgtccacgtccgggtcgccctgctcgtccttcatggtgggcagcgcacactccgccttcttggcggtgcagggcatgatggacaccacaaacagcttcttggggtccacgccgatcttctgggcaaagtaactcttggcgacggcaccgaacatctgctgggggctcttggcggtggacaggttttccgtatatgacgggaattgtcccttcaggaaccgcacccagccgggacagcagctggtgaacatgggccagtggtatttgttccggtgggtaaagcgctcgatgaactcactgccctcctccatgatggtcaggtcggcggcgaagtctgtgtcgaatacatagtcgaagcccatggtcttcagcgccgtcaccatgcgctccgctgtggcaaacttggggtccagatgataaaactccgcccaggccgcccgcaccgccggtgcgacctgcaccacggtgatccggtccttgttcgccagcgcgtcgaacaccttgccggtgtcgtcgtgctcctgcagaccgcccacgggacagtgggtgatgcactggccgcagaaggtgcagtcgctctcgcccagggtcctggtgtgggccacgcccacggtggtacgagtaccggtgcccatcaggtcccagatgcccatgccctggatcttttcgcatacctggatgcaccgcatacacttcacgcagcggttttcgatacgcaccaccggattggagtagtccgtggggatgttcttcaggtcgtcgatatagtggtcgcccagcaggttatagtcgttggtcagctgctggagcttgcagttgccactgcgggtgcacttggtgcacttcgtctcatgctggctcagcagcagccgcagattgactcgccgggcctcgcggacgcggggcgagctggtgtacaccaccatgccctcgctaacagcgctgtcgcaggagggcaccagccgtgcatagccctccacctccaccatgcagatgcggcacgcgccgatctcgttgatgtctttcagatagcacagggtggggatgctgatccgcagggtctgggccgcctccagaatggtggtgccctccggcaccgatacggtccgcccgtcgatggtcagagttaccatttctcattcctccctccccggaaaatgccgtagccgtagtgatcgcaccgcaggcagcgggacgcctcggtccgcgcgccctcctcggtgagcccacactcgatatcctcaaagtcgcaccggcgctcgcaggcctcgcgctctgtggtgtttattcggccgtggggcgcgcggttgttcagccgcggtgctgggatgtccagctccaccttgatctcatgccggaagcccaggtgctcgtcgatgttggctgccgccaccttgccggcggcaatggcgcggatagcggtggccggcccggtgacgcagtcaccaccggcgaatacgttatccatgtcgcccacttggccagacagtcccgctacgaacgtgccgcgcttgatgggtacgcccgcctgctcgaagccctggatctcgatgccctggccgatggccaccacgatgatatccgccgggatgcgcacctccggcaggtcggccttgttgggccggggccgcccggacttatccgcctcgccgatgatctggggctgcacccacagcgcggcggcattgccgtcctcgtcggcctcgatgtgggagggggccatcagggcggcaatctccgcgccctcggccatagcgcccgttacctcatccggcagagcggtcatgtcctcgatgcggcggcggtacacgcacgtcaccttttccgcccctaggcggatagaactgcgggtcacgtccatagccacgttgccgccgccgatgaccaccacccgcttgccggtgaagtccggcatcacgtcgtcacctatggagcgcagcatctccaccgcggacatcacgttcttgctgtcctcgccggggatgcccactttcttgtcctgatgggcgccgatggcgatatacaggcagtcgtattccttttgcagctcctccacccacaggtcgacgcccacggtgacgtctgtgtgcgcctcgatgcccagcgacaggatggactcgatctccgcgtccagcaggtgccgggggaagcgatagctggggatgccgtagcgcagcatgccgcccagcttgtgccgctcctcaaataccgtgaccttgtgacccatcagggccaggtaataggcgcagctgagtccgctggggccgccaccgatgaccgccaccttcttgccggtggaggctgcgcaggcgggctgcggcacgtctccggcagtgtccacggcgtagcgcttcaggccgcggatattgatggcgtcatcgatcatattccggcggcaccgcgcctcgcaggggtgctcgcagatataggcgcaggccacagggaaggggttgtccttacggatcagccgcaccgcatcggcgcagcgtccctcgcctatcagggccatatagccgggtacgtccacaccggcgggacacagggccacgcagggcaccggcagctgcaagcccgccagacagcggtggtgcaggatgtgttcctcgtagtcatcccggaagccctccagcccgtccagcaccagtcgggcggcgtcgcgcccgatggcgcagtcggcggtgttcaccacggtccgcgccgttttctcgataatggccagggtgcccatgtcggcggtgccgtccagcacggtggcgatgagcttgctcagctgccccagaccgatacggcagggcacgcacttgccgcaggactgggcgtggcacagctgcaaaaacgacagggacatatccaccggacagaggcccggaggactggcggcgatgcggcgctccacgtcccggtagagattatccaccacggtctgggcgcggcttgggttcttgatgtcgagtctgctcaagggggtcactccttccgtctgcactgcgcggaagcgtgtccgcgcggcgcttggaaattataagttaaacaaaagaatgacacaaaatccaccaaaagtcaacataagaaaaaagattgttttcataagaggaaattatcgtaaattgcctggtttttaacgttatttgtgcagcaaacggtccaatttgattggctgttttttcctaaaacgaaaaaatccccggcacactgtgccggggatgagagagggtggctgtcacatacggctgtgccgcaagtaccggtagtcgctcttgatgatgttgcggaagaagggcacgcacagcaccgtatccgccgcgatccacgccatggggtcggcggcgcagagggcgtagaaggccatggccggtgcatcggcgctgacggcgccgccggcaaacagccccggcagcaccagacacacggtgatacgcgccaccagctctgccgcgcctgcgcccagcacgaagccgctgcgcccaatgccctgcacgcagttgcgcaccacaaagacgaagcccagaaacaggtacatggagaagtccacatacagcagcgagttgccgtagcgcaccgcgtccggcgtcaccttgtcggcgctgaggaacacatggtagcagaagtcgccccttgtcagcagcagacccgtgcccgccgccagaatcgccagaatggacaccatgcccagcgcttgcagcgtgccccggcgaatgcggtcgtactgacctgcgcccagattctgcgccgtgaagctggtcatggcgccgcccagcgcgttcatgggcgtggccaccagattgaacagccggttggccgcgccaaagccgttctgcgccgcgttggacaccatcacgccgtcccgcatgtcgaacttcaccacgccgccctgcatgacgatgatgcccaccgccagcacggagaactgcaggccaaggggaatgccgcggaccaggtgccgcttcacgtccatgagggtgatgcgccagtcctcccggtgcagacgcagcaccggatagcgcacaaaggcgtagataaagcagccgatggtgctgaccagctgcgccagcaccgtggcgccggccgcaccggccacgccccagcggaaggacaggatgaacagcaggtccagccccacgttcagcaccgtggagaacagcaggaacagcagcggtgtcacggaatcgcccatggcgcgcaggaaggagcagatgaagttgtaaaacagctgcgcgccgataccggcgaagatgatggcgcagtaggtgtacgccgcggtgtatacctcgtggttgtccggcgtcacgttgatccacgccagcatgggatccagcagcaccagcgccagggccgtcagtgccaccgtcagcgccgccgacagaaggatctgcgtggccagagagcggcgcacgccccgttcgtcgtgcatgcccacatagtaggacgtgatgacgcagaagcccgcgctgacgccgaaggcgaactgcaaaaagatgaacaccagagaattggtatcgttgacgccggccacctcggcggcggtaagcgtctgaccaacgatggccgcgtcgctgatggagtacacctgctgcaaaaggtaggacaggatcaccggcagagaaaacaggaggatcaccttccagcacggcccctgggtcaagtcgatgggctcccttcttttatgtgctgttttcacagaaatcgctcccttcttttgtgtagtatagacaattatctctctcagagcgccgattataataccttgcggcgccgttgtcaagagctcttttataaaaaatccgtccaccggtcattcccggtaccgcgctgccgttcttcacgcattttgcggcgcatttccgctttccgccagtggatacagccggtatttcgttgcactttctgtcactttgtggtaagataccattgacacaaatgaaacggggaggtcacttgatatgagatccgatggcacaaaaaagtcacctgtgcgtatgcttgtctacctgctgcttctcgcggcggtggtggccctgggctatttcaccgacatcgttgacttcacggagctgaagactgttttttctctgaagctcaccgccctgctgaagctggctgtcatggtcctgctggtgctgctggtgtccaacctggtcatcttcattctgcacggtatcaagccccgcacccaccgcggcgggtctgtgctgtcgctgctgagcagcctggtcaaatatgtggccggcatcatcatcgtctgccagagtctgtccctgctgggcgttaacgtgggcaccatcatcgccagcgtcggcgtgctggccctggtggtcggcttcagcgccgagagtctcatcgctgacgtggtcatcggcgccttcatgctgctggagaaccagtacaacgtgggcgacatcgtggaggtcaacggtttccggggcgtggtcaccaagatcggaatccgcaccacctccatcaccgacggcggcggcaatgtgaagatcatcaacaactcggagatgaagaatatcctcaaccgttccgataacaactcctggtctgtcagcgatatctccatcccctatgagacagacctggagaagctggaggcgcagctgcccgccctgctggaggagattttccgcgcccggggcgacgtgatgctggatgtgccccagtacctgggcgttcagacgctggacgcctccggcatcgtcctgcgcttctgggtgaaggtggcggagaagaacatctacgccggcgcccgcgccctgaaccgtgagctgctgctgggcttccgccgtctgggtgtggagtgccccttccctcagatggacgtacacatgaaataagtcatggaagagaagaacaaggagttcaccctggcgcaggagcacgccgcccctccaccggagtgcgctgccctcccgccggaggtcctgccgccggacaccgtccttcccggcgaggcctccgccgcggaaagtgccgccgcgctgaaaaagaaggccgccaagtggaaaaagatcgccattatgctggtgggcctgtcggccatgacggcggtggccgtcaccggcggcggcacagcggaggaccccatccccgcaacgccggacaccccgccggtccagcaggagccgtatgttccgccgaaaccggagccggagcccctcaccggtgttctgcactataccatatacaacgataccttcgacgacagcggcgtgcccctgatcctggccgagggtaccgtggacatggccgcgctgtccgatacgcccctggcgctgccccagccggagacgccgtccgatggcagctatgcgttcctgggctgggtgggcggtatgacaccgccggcggaaaggtctggacgacggtgccggaccccctgacggcggacttcgcggcgtccatcagacccggagatacaggggagaggtcgatcgtgctccgcgccgcctggcggctgacggagcagagccgctacccctggtccctgacgctggacgacggcgtcaatgccgtcacctatgaggcggcggtgcctatggcctccggcggcgacgtgtacctgtgcgcctacccgcagcccacccgcgacggctatcgcttcaccggctggctggacgcggcaggggagagggtggagcttctgcccgcctccgccttctttgccaaaaccgccgacggcgataccgactggcgcaccaccgtccctgtcaccctcaccgcggaatgggagaaagcatagcaaaaaaagaacagtccctttaggccgcctggcataagaaaacatacgccgcaaaaggcgcgtttcgcgcagccccatcgttgcgccgccttgacagacatccagtatgcctgcggcggcgcgcctcggctctgcacaaaacgcgctctttttcggtgcgaagcagttttgccaaagtaaattcgaactgaaattggctgcaaaaacgcccgcatgctgacgcatgtgggcgtttttcggtcgatttcagccggatagacacaggcaaaaccgtgtgttttcttgtgtcaggcggcctttcgactgttcttttttgattcttcttagtacgccacgccccagtagatgtcggtggtgcattccttgccgcacaccacgcacttgccggtggtgccggactgcttcagcggcatgcagcggctggacacgccggccttctccttcatggccagctcgcactccaggctgccgcaccacttggtacgggcaaagccgcccttgccctgggccatctccttgacctcctcccaggaggtcatatcgaaggtgttgtcctccaggttcttctccgccatggcgtacaggttgtcgtgcacatcctgcagcagctgctgcacggcgctctccagctccgtcagggggacgaaggtcttttcaccggtgtcgcggcgggcgatgcagcactgacccttctccatgtccttggggccgatctccacacgcaggggcacgcccttcatctcgtactgggcgaacttccagccggcggactggtcgctgtcgtccatgctgacgcggataccggcggcggtcagacggtcgcgcagaccggcggcggcctccagcacgccctccttgtgctgggcgatggggatcaccaccacctgggtgggagcgatcaccgggggcagcaccagaccgtggttgtcgctgtgggtcataatgatggcgccgatcaggcgggtggacgcgccccagctggtctggaagggatattgcagggtattgtcccggccggtgaacgtcacgtcataggcgcgggagaatttgtcgccgaagaagtggctggtgccggactgcagggccttgtggtccttcatcatgcactcgatggtataggtggcctcggcaccggcgaatttctccttgtcggtcttgcggcccttcaccacgggcatggccagcgcgtttttgcacacgtcggcgtagcagttcagctgctgctccgtctcggcctcggcctcggcggccgtctcgtggatggtgtgaccctcctgccaccagaactcgcggctccgcaggaacgggcgggtggtcttctcccagcggatgacggagcaccactggttgtacagcatgggcagctcacggtagctgtgcagcacatggctccagtggtcgcagaacatagtctcggacgtggggcggaaggccagacgctcctccagctgttcgctgccgccatgggtgacccaggccacctccggggcgaagccggccaccagctcgccctcttttttcagcaggctctcggggatgagtaccggcatggccacattcacgtggccggtcttcttgaactccgcgtccatgtacttctggatattctcccaaatggcatagccgtaaggtcgaaggatcagaaagcccttgacgctggcgtagtccaccagctccgccttcaggcagatatccgtataccacttggcgaaatcctcctccatgggggtgatcgcctctacatttctctgatccttagccatagctttataccattcctttgttagtatatagggtgtgtgccaacttcacattttacccgccgccatgtgacttgtcaagttgccgccgcaaaaaggccgcaaaaaagcgccccgcagggcgctttttcagcgatcccggcccagccgcctgtcgcggcgccggccaacgatgacatacacgaacacataggcgatggcgccggtcagcagtccggccagcacatcgatggccgcgtgctgcttgacgaacacggtggccgccatgatgaggatagcgtacagcgtcacgccccagcgccagccgggcttccgcagtcccggcgtgtgccacaccgccgccacagccgccatgcagcccagaatatgcacgctggggaagacgttggtgttggtgtcgatggaataggtgtactccaccagccaggtggcggcattgtggtgcgccatcaccgccggacgcagatcctgcccgttgggcaccagaatgcagaacaccaccgctgtggtgaacgtcaccatgatgaaccacatataccggcggaagccctcggcgtccttcaggatcagatagacgcccagcaccaccagcagcgggctccaggacacataggggaagatgaaccactcgcagaaggggatataggtgtccagcaccgtctgtgtggcccagtagttatcggtaataaagtgctcgatggtaaaaaacatcgccagatagaccggcagatacgcgccccaccaggcgtggggatgggtcttgaagaattgcttgatcgcctgcatacgatccctccgacagacttgatgatttcgtatcccgtattgtaccagaaccgccccggaaaaggcaacccccgccccgcaaatatcacagaatttttacaactcagacaaaccgccgcaggtgttgaacggactggacaaaccggggcggcgtatagtatactgtctccaatacagacacaggaggaactgccatgcagatcatcaagcgggaggagcttcccgaacagcgccaggtgcgcctgactatcgccgtggacaaggacacctggcaggcgtccctggccaaatgctaccagggcgtcaagtccgtctgccccgtggccggcgagcctacccgtgaaaacctggaacaggcctacggccccgagtttttgtaccaggaggccgtcaacgacacctatccccaggcgctggtggaggccatcagccagagcgatatccagatcgccgggacccccaccctgtcggtggagaccatcggcccagacggctataccttcgccgccgtcatcgatctgtacccggaggtggagctgggacagtacaagggcctgtccgccgtctacccccaggtggagctgagcaatgacgataccgaggccgccctggacgagtacgcccgggccaaccccgaggtgcagcatccggaaagagccgccatgggcgacgaggtgacgctggacttcgagggctttgtggacggcgtgccctttgagggcggcaagggcgagcagtatcccctgctgctgggcagcggctacttcattcccggctttgaggagcaggtggccggcgccgccgtgggcgaggagcgcgacgtaaaggtcaccttccccacggagtacgtcccggagctggccggcaaggacgcggtgttccatatcaaggtccaccagatcacccggcgggccatgccggagtggaacgatgatttcgcccgccggcagggctttgccgatgtctctgccctacgccgggccgtcatggagacggcggtgcagaaaaagcaggcccaggcggcggagcagttcgccaatgacctgatccgccaggtgacggaggccatgaccgttaccattcccgccgccatggtggagaaccagctggacgggctgatcaacgagctgcgcggccacctgcaggcccagggcgtgtccctggagcagtatctggagatggggaacaccacgatggagcagctgcgtgaccacgcccgcgagcaggccgccgcggcggcgcgctatgagctggccatgaccgagatcgcacgccgggagggaatcgacatttccgaggccgacgtggacgccaagtatgccgagctgtccaaacagtacggcctgtccgtggagctgctgcgccagcagctgccgcccctgcgcctgcgccacgatctgaagctggccgccgcccaggcggtggtggtggactccgccaaacgcaaatgaccgtcccgcgggcagcagcctgcccgcgtagcgatcaatgaaaagcaagggaaggcccgtacgggccttctctttttgtatatcgaaaaccactcgcccagtgagtggttttcaggatacaaagggcggcggacagatactgcccgccgccagatcgctttgtcgcttatatgccctaccagggatagaagtagatcaccgtgtccggctctaactgaatgggcagataggagccgtgttgtcccttgtcgacggacagatatccgctcccgttggggtcagcgtttgggtcagaaaaaacggcaagtaagatattaggcgcaaaagtacggaaaaagtcctgatttcgcaagaaatcaggactttctggttgcggagggaggacttgaacctccgacctccgggttatgagaaatgcaccgtgaatttcttatagtcccatagtggcgcatatgatcccaggaagtcagtattttcaagggttcggaggaatctgtattcgtctttgctcccatcccgtaccatgaaatcttacagcggttggtgtcagcgttggtgtcaactccaagtgaagagccatgagatgaccgattttgttggcccaaccacgcaagaaacgcacctttaggtttttacctctaagggattcggttcattggggttcagacaaaacaagaaataaaccatcaggcacatgaatcgtaccaacatctaaatagcgcaatggcgcagcattatcggcgaaacatcattccacattcggtaatgctgcgccgcttttgctctatgccaattataacacacggcttcccgctagggaagcgcatttcaggaggtttctatgtcagaatatacacttgagatcaaacagatcgtagactatccacgctgccggatctaccgacagttcgtacaagccttgatagcagaccggagcattcgcgtgagcggaggctccggtcttttttattttgtcgtgctatgcgcctatgccaacttccgcacctcatacaagcgcattgatggcattagttacaccatctaccccggcgaatggattatgtctgtggaggaattgtcccggtatttccgcactcgcttccgccgccagaccttggccgctttggagggactgcaaaagaaagggtttatcagttttctcgttctcggacatggcaagctggtcaaattcaagattcggggctggcggcgtcacaacacgatccttgactacaacgcgccttgtcagaaagataccggctttttcttcttccctgtctctacggccacagaactggtcagtgccggtcactgctcagagatggacgccgtactggatttgtggctgaacaccgtctataacgatccgcaggttctcggctcagacatcgggccggtggtctatctccgcaacggtacaggctgcccgctggtcagctacgcggaactggcatcccgctggggcgtctctaaggcaactgccggtcgatacctcaagcgcatggctgaacggggctatctgcaactgacaactttccccggtacgcacggcaccacgatctacctccagaactatctctccaccatgttccaaatttctgacatcgtggtggataaggaggagatcgccatgagccttggcatcaagctggagcttcaggaagaaaccaccctgaccactgcggcatccagcggttcaaatgaggccggtagcgtttcagaaatgaaccgccatcgaatcgagcgaaagatgcgtgaaatccttgtagcacaagggctgccttgcgcttcatgccctaaatctaaatatatgttattaccattatccgacgactgcgaggttacgatagaaggggtgcctccgctgcgccggtggcttcaactggtggtcacctgcggtgacgctcatgaagtctatcactttgaactcagattgcacccgacagggatgcgcggcgataaggaggtcgaacgatgaaaaagactgcacaggaacacaaagtgaccgagaaccccttgtaccatgacacgtggatgctgttgcgcaagtaccgggacgtggtgtggagcctggagctgtccgtgcagcaggtacgtcggcagttccagatcgagtatggcagcagcatagaggagtttctggaatccctctatgtggccggcatcaccttcgagggctcggcgattgaggatcatgcccgctgcatcgagcgcagctacaagatgttgaagctgctggatacctccgtggagctgctgcggacaaagcacaaatacggtgagagctattactggctcctgtactacacctacctgtcaccgcagcagttggcgaacacgcaggagatcatcgacaagctggagccgcacattcgggacatcagctaccgcacctacttccgcaagcgtcagatggcgattgatgccttgagctcggtgctgtgggggtattcttcgaaggagagcctggcactgctggaaaagtttgtgccggaagcaaatacatgacccgatctccaatggcactctcccgccacaacattggcacggttttgcgatttcggcgtaaaaccaagtgtgctatactgtgtatgctcaaaactatgccaaggcgatacgagtaacaccatctttcggggtggtgttattttgtttccgggtatttgggcagtccaagaggggcgacttttagagagtagcccctccacattttttctatcacaggaggtatcacgagtgaaaaaacatgacctgaccaagacacatctccacagggcaagtcccggcatggcactatacgcggccttcgcgggcgtgaccatggccgcaatgctttgccagcctgtctttgccgccaccgtctgggagaaggccaatgagatcatgaaggatgtctataaccagattcttcttatctccaccattgccgccattgtcaccgcgtcggtggcactgctgatgatgaacttctcccgcagcggccgcactgtggacgagagtcgcgcttggctcaagcgtatcatcatcacatgggcaatccttaacggtttgggcttcatcatgtcctatgtgacgcccttcttcgcggatggcagatggaacggataacgccaagctgcccggctgagaaaggagaagtgctatgggcatattagatggcattgtagaatggatcgcggaacaggtcatgtacggtcttgaccttatcaacacctctgtgctgggggctctgggctgcgacatgaccaccttcctgcgctacttccctgccgcggagacgatgtacaacatcttcgtggcactggctatcggcatgatcctgctgaacctgatctggcagctattcaagaactacggccttatagcaggcgtagaggcagaagacccggtaaaactgacaatccgctccgtgctgtttatcctgctggcctatttcgcagatgaaatcgtggagctgatactgaaaatcggcgggacaccctacgcgtggatcatgtcgtctgagctgcccacactgaactttgccgacttcaattcggtcatacttaccatccttggggtctgcgccaacggcgcggtggctctaatcgccctgatcctcgtccttatattggcgtggaactatatcaagctgctatttgaggcggcggagcgttatgtgctcctgggcgttctggtattcacggcgccggtggcttttgctacgggcgcggcgcaggctacctccaacatcttcaaggcgtggtgccggatgttcggcggccagatatttctactgctgatgaacgcatggtgccttcgcctgttcatcaccatggtgggaaccttcctggcaaaccccttatccatataggagacgatcatgaatcaaaaaacgaaatacatcacagggatcgtgttgtccgtactggctatatgtgcgctcacaatccctgcctttgctctgacggaatcggatgtgcagtctcaggtctcagcttccggtaaagaaggcgtggccggaaacctgttcgtttggtttctgtgcgcagtggcatttttgaagatctcacagaagatcgacagcttcatgcagggccttggcatcaatgtgggccatacaggtggctctatgctggcagaagcgatgctggccgcgcggagcatcgctgccgcccgtggcgtcgccggacgaggtcgaggcggtaatgcagggcgagccggaagcaccggtggcagtggcggtgacagcaataccttcctgcaaggcggtctggccggtgttgccaatcgtagcttctataacggcgcataccgaaacgccaccggcacaggcagcggcggcgttggcggcatggcgttccgtgcctctatgaccaagggcggcgatattgccaataacgttatcagccggattgccaccggcggtgcgggatctggggatgtcatgtccggcaatatggcggcggacgctctcaagtcctatatgggctatacggctcttggtgaaggcgcggcggatattccgaacttctccaatgtggagatcggcggtgggcatatcaccggcacggagacctctgaggaagaacctgccggtcgtgcctttgccatgtacagcactgaacagtatatggagccaaaacgggaatacaccaccgtcaccactgtggacggcgcaaaatggtataggcagtacgcacaggacgtagtggagaaaaagccctatcagaatccggatggcggcatttcctatcgtgagagcctgatccggcgtctgcctgacccgcctcgcagaaaggacaagacctgatatgacccagcaagaacgcagcggtctaaacgaagccgctgagatcagcgcacacgctgccggcgctgtgcgcggcgccatcaaaaccggaaaagcggtaagcggcgcggcaaaaggtgctgctgccgcaggcccttacggtgcggcggcagcggcactctggacacatcgcaaggcggctgctgccatcattgccgggttgctggtgcttcccatcttgttcatcatgctgctgccttccctgatcttcggcgggttgaccaaggcaggggttgaaggaagtccagacacaccgattcttactgacaacgccgccattgcggagaacatcaatcagatctcgcaggcaatcagcgacttgctggaggaagggcaggaggatgttcgcgcccgtattggcacggattttaccgcttccggcgctgaccagaaggagatcatcaatccatacgaaagctccccggcatacaatgccaaccgcttcattgccatgtactgtgccgccaaaaatcaggactacgcatctatctccctcaaggatatggaggatgtgatccgtaaggccaaggacgccctctataccttcacgagcacggaggagtctcgcacgactacggtaacggaaacgaatacagatcccaaaaccggtaaggtcacggtgacggaaacggaagtaacagagatatggaagatatataccatcgtctacaacggagaagcctattttgaggataagatattcgctctgtcggacgaacaaaagggattggcggaaaactacgcccagaacctgagcgtattcctgggcgatggtatgatgcagggcttgctgcccgccgagtccgccggccttgtatctttgggcgacattcgcttttcggatggcgcgacgcaggtggtctactataatcagttggacaagcggtacgcgcacaagccctacggcaccgacgacatcggcacttacggctgcgggcctacctgtatggcaatggtggtatcttctttgaccaacgagacggtcgatcccgttgagatggcacgttgggcctatgaaaacggttactggtgcagtagaagcggttcctaccattcgctgatccccggtgctgccaaagcgtgggagcttccggtacaaggctgcgggaaaacagaagggcagcgcattgtggatgcgctctctcaaggcaagctggtggtggcaatcatgctgaaaggtcatttcaccagctcaggacacttcatcgtgctgcgcggtgtggagaacggaaagatactggtggccgaccctgccaattatacccgaagccaacaggcatgggatctggctatcatcctgaatgaagccagcggccgtgccggtgctggtgggcctttctggatcatagggtaggaaggagaactaaatgtgagtaaaccaaatgaatatgacacctatatcatcccgcccaattttattgaaggcgggacttttttcggcggactgctgaagctccgcaacacagccgaggcactggttatcgtgctggctatcggcataccggtgttctcggtgtccgccctgacattgactgctaaaatcatcattctgtgcctgaccgcgctgccgttgggcattatcgcactggttggcatcaacggcgaaagcctctcctcgttcatctttcttgtcctgaaatatctccataaccgccgcgttattacacgcaacgaagaagaacagggcaagcgaaagaaacggaagaagcataaagctaagagcggtgacgacgcgcccaagtacatcaatccagtggcggaatacctgcctgtggagaagatcgaaaacggcatcatctacacacgggatcaccgttacctgaagattgtcgaagttatacctatcaacttcctgctgcgcagtgccagagagcagcgaaacatcatctattcatttatttcgtttctgaagatcagcccggtcaaaatgcagatcaaggtcattgccaagcgtgccgacctgaaccggcacagagagatcgtgcagcaggagatggcgcaggagaccgatgaaaactgccgcctgctgcagcaggactacctgacgctcattgaccggatcggtgcacgggaagccacctcgcgccggttcttcatggtatttgaatatgaggcatgggcaggccggaaacgggataacgaggaagcggaggccatcgcctccctgcaaacggcagcccgcaccgcagtcaattatctcaagcaatgcggcaatgaggtgctgatcccggaaaacgatgatgaatttacggtcgataccctctaccatttgctgtgccgcaacaccactacatcgctgccggatcgagttcgccggatcgttgcccagtatcaggagaaaggactggaatctgagatcgacgccattccctgtacggagttcttcgcccctgacagcatcgacttcaccaacgggcggcatatctgtattgacggactctactatgcctatctgctggtgccctccaccggctataaggcgcaggtgccggccggctggctgtctctcattgtcaacgccggggatggcattgacctggatatgttcatcagccgccagccgaaagcccgcatggtacagcggctgggacagcagcttcgtatcaaccgcagtaagatcaaggacgccagcgataccaacacggactttgatgatctggatggtgctatccgaagcggctacttcctgaaggaagggctgggcaacaacgaggacttttattacctgaatctgctgatcgcagtgacagctcccacagtggatgaactggaatggaaggtcaatgaactgaaaaaactgctcgtgtcccgagatatggacgtgtgcagctgcgcctttcatgaggagcaggcgtttctatcgtctctgccgctggtcagcatggagagacacctctttgaacgctccaagcgcaatgcgctgaccaccggcgtggcaagctgctatcccttcacgtcctatgagctgagtgatgaaaacggcatcctgttcggactgaacaagtacaacaactctccggtcatcatcgacatctttgactccaaggtttataaaaacgccaatattgccgtatgcggcaccagcggcgcgggcaagaccttcctgatcctgctgatggcactccgtatgcggcgcaagggcatacaggttttcatgctggcacccctgaagggtcatgagttccaccgtgcctgcgtcaacacgggcggcgagttcatcagtatctcccccgcctccaagagctgtatcaatgtgttggagatccgcaaggtggacaaatccgtagaaaccatgctggatggccccggcatcgaacgctctgaactggcagccaagatccagaggcttcacatcttcttcgcactgctgatcccggatatgtcctatgaggaaaagcagctgctggatgacgccctgatccgcacctatgcgcggaaaggcattacccacgacaatgcctctctccgtgatccggatgacctcgacgtttaccgccagatgccggtgttgggagacctctacgacgttctgaaggaggaaagcgataccaaacgcctttccaacatcatcaaccgctttgtacacggctcggccagcaccttcaaccagcagaccaatgtgaatctggacaacaaattcacagtgctggacatctcggaactcagcggtgatctgctgcctatcggcatgttcgtagctctggatttcgtgtgggataaagccaaagccaaccgcacggaggaaaaggccatcttcatcgacgaatgctggcagctcattggcggcggctccggcaccttcggcgtcggcaaccgtcttgcggctgaaatggtgctggagatcttcaagaccatccgcgcctattccggcagcggcatttgtgcgacacaggatctgaacgacttcttctccctggacaacggcaagtacggcaaggggattatcaacaactgccgcacgaaagtcatactgaatctggaggatgaagaggcccagcgcgttcagcaggtattgcatctctccgaagcggaggtcatggagatcacccactttgagcggggtaacggcctgatcagcagcaataacaacaatatcacggtagagttcaaggccagtccgctggaacgcgaccttatcaccacagaccgccgtgagctgcttgacctgctgcgccgcatgaagcgaccggaagcctaatacggcgtttatacggagataacacgcattacaaaatcaatacgcatttaatacggagttaatacgcattacggaggtgatgccgcctatgagaaacagagaacagatctatggacaggaggccgcagagctgctgcggaacataaccgtctatcactgcatacgccgtgaccagcttctacgcctgtatccgggcaaggagggcgtgattgaaaacctgctgcgctatctggtcaagcagcagcggatattttataacaccggccgggattgctacggagatgtccctgactgccgcgaggacagagaactgacagcggcactatgggtgctgctggactttatcgaaaaggtggagtatcacagccctgacaatatgccggcaaagctggtattcttcgccgatggcgaggtatatgaggtcgtctatgtaggcccgggtaaggaagcgttgctgcagcacgcgctggccgcggaagatgattccgggcaacggctcgttatcattgaggaagaagaccaaatgcagcacctgcacatccctcatatcgccgcctactgcatggtggatgagcagggctgcgtacagtacttcaggaaggaggaaccttgtggacagagccaccctctcgcagcggatagagagcattttgaatgagatcatccgcctgtccaacacgctctacgctatggacaacacgaatatccagcggcattcagataactatgaaatgctgtccacagaggccgcactgcggggggaggtcattgcctgccggctgcggcacctgatctatgagacgaccaccatccgaaaagccgagtatctgacatcggctggtgtcatgcagggcatctctgttatagagaaagatggcatactggaaatcacgctcccctgcctactgcctaagaagagcaagaagcatagctgcgagtatctgacagaccccatctactacacgcttagtaagtatgcgcagacacacacgctgcccaagttccggcactgtgttgtctgcttttctcatatctacagccgcgagctgtccccgaaccgggtgcgtgactatgacaatctggagctcaagcagcttttggatgtgattgccactttcgttatggaggatgatacaggtctgctgtgcgatgcctataacacgacggagatcggcgacggtgactgtacccgcgtgtcggtgatggataaggagcgttttcagggctggctttcggaccgcgagaatcggctcagatctatatccgatttatagtgtttcgaccgtgtcaaaaacagtacacatgacgatggtacggcaaagcctgtatttccgggcattttcacatgaccggtgcgggcgaaaaaataccgtggtcatggcagtctgggtactgcacaccagaaggaggtggtcagtatgagtaccctaccacagaaagctcccggtagcctatcacaagcctatcagctattggcgctggtcgccctgtccggtgagctgccggccagccaactgagcaggctcgccggtggcaccagctacaaagagaacgtggtcaagtcgctgaagcgtcagcggcttttgctgtcctactataagaacggactgcgtggataccggctcaccgccgcggcgaaaaagctgctgctggagcacaacccggagaggttttctttctacctgtccggagcctgtgccaccaaccacatcaggagtgagccggagcagaggcttcgactccaccgtgtctctcagacattgatcaccatgcgtaacgccaacgttagtatcttccgcgatgaaaaacccggcgtattccgccccggcgaaacagcgactggtagcatctgcacccctgccttctactcatcccgtgagatcaaggagatggggacaacctttgttaaaatccgtggtgcccggtccgtgggcgttttgctgacaccgcagcatatccacgtggtttacaacatgggcaacgcgctgatgaaatggagctataaagctgagatgcggacaaaggcactcatgcagacggtgctgtgccgtgaacgaatgccgcaccagtatcacccggatgcggtgcggggtctcctgctgggtgatagcatggaactggcctatgagctgctgactgatcagggtggcaaaaactatttcgttctggatggcagctatgagcggttctgcttcttgaccaacgaccatcatggagaggtgctgctgcgcctcctctgtgatgaagagttggacaatgacctgcgtgagctgctgctccttgatctggagccccggcagctgagtgaaacagtggagaatgacgccatgacgccggatggtgcgccggtgctgttcgcctatgactgtgacctgccgcggatcaggcggttcgatacggcgttgcggctccaagaccgctacggcatcctgatctgcttcgaccatcaggccgaagtgctgcgccgctactgcggcgacagggttgttgtgcaggccattgattttgctgcgttcgagaggaggtttttcccgtagaaaaaaagaaactgcgaagtctgctattcgcgctcccgctatttctggcagggctgctgtttggcggcggttatctatcgcaattcgtccgaaactatcaacagtggaaggacgcgggcggaacgccaggcgacggaagctccccggccgcgccggtgctgtccctctccgcttgctgcgaagcgctgctcagtaagagcggcattatcggcgtggggctttgcctgttgctgctgggcctgctgatcgtcatggtgatgcgcatgggctattccgatgttggggagtatgacgcggagcgcaacctgacctactccaacaaaggcacctacggaacggctggtttcatggagaaagcggagatgaagggcgtccttgatctggtgcccgatatccgcaaacacagcggcgtcatactgggcaagctggacaatcaggtggtgtgtattcccgagaactcccggcttaacggcaatatcgccgtgttcggcgccagcggctccatgaaaacgcgagcctactgcatcaatcgcattttgcaaagcgcgtccgaggcccacaacggccacaaggagtccttgatcatcaccgacccgaaatcggagctttacgaaaagaccagcgaatatctgcgcagcaagggctacgtggtaaaggtgttcaacctgatccagccggagaactctgattcatggaactgcctggcggagattgagggtgatgagctgatggcgcagatcttctgcgacattatcatcaggaataccggcagcgaaaagggcgaccatttctggaacgctgccgagatgaacctgctgaaagcgttggtactatatgtggcgctgggctatccatcggagagccggaatatcggagaggtctacaagctgttggtgctgaacgcggagaaagaactggacaaccttttttccatgctgcctgccagccatcctgccagagcgccctatgcgctgttcagccaatcctcagatacggtgcgcagcggcgttatcatcgggctgggcagccgcttgcaggtgtttcagaatcggcccatctgccagatcaccagccatgatgaaattgacatggagctgccgggcaagcagccctgtgcctatttctgcatcacatccgatcaggacagcacctttgatttccttacgtccctgtttctgtccttcgcgtttatcaagctgatccgttacgcggataaaaactgtgccgaccgcaggctgccagtccccgttcatgtgctgggcgaagagttgacagcctgcggtgttattccagacttgagccggaagatcagtgtgatccgctcgcggggcgtcagcatgagctgcgtgtttcagaatctggcgggcttgcagaaccggtatccctacaaccaatggcaggagatattgggctgctgcgactatcagcttgcactgggctgcaccgatgagctgactgccaaattcctcagtgaccgcaccggggaggtcagcgtccatgtctccagcaaggccaagcagttgggtacatggcgtatcagcaactacacgccggagttccgcgaaaccagcggcgtgggcaagcgcaagctactgactatggatgaggtgctgcgcctgccggtaaaccgcgcgctggtcatcgcacgcggcaacaaggtgctgcaggtagataagtacgactataccaatcactacgaggcaaagaaactgcgggactgcaaggcctccgcccacatcccggaatggcgtaaaagccccgtgttttcgcccgcaccgaaacaaacagagcagcctattaagtcaaagaaggtgccgaacaggcgcagtgagtttgtaaaaaccgataaggattccatcatgtcaaccaaaatgtgagctaaggaggaaagtaatatgccgagaaagaaaacagaagaacttgccgtgataccggaagcgccggtgctgcccatcgtcccggaggagacggcggaacagccggtgacagaagagtgtttgccggaaaacgcagccgatcctgttgtggaggatactgtacctacagagggtgttctcgacgagcctgcggaagtggtgactgtgccggaggatccccagccctctgaaaagccgaagcgcaccgtccgcaaacgaaccgctgcaaaaaagacggtagaggtggagaaacaggctacgccgcctactgaggatgctgccgcctctgctgaacctgcccctgccgctgtccatcagagagatattctgacattggatgcccggggtgaagcggaaacgcaggcgcagatggaggacattatctggcacgagattcacaatgcctaccgcacccggcgcatgctctccggtatgctgagcggcattgaaagaacggaggcggggaaaaccattgccattgtggactacaagggattccgcattgtgattcccttgaaggagatggtgctggactttccggcagatatgtacggtgctgactataatgagatgatcctccgacaccagaagatcctcaataagatgctgggcgcagaggtggatcttatggtcaagggcatcgacgccaaaagccgaaccgttgttgccagccgaaaagacgccatgctgaagaagcagcagatctactatttcggtaaggacggtgacggacagtatcgtatttacgacgggcgcgtggtggaggctcgtgtgatcgctgtggcggagcaggtcgtccgggtcgaagtgtttggcgtggagacatccattctggctcgcgacctttcgtgggactggatcggcgatgctcatgaccgctatgctgtgggcgacaagactctggtacgcgtgctggagattgaccgcacagagccggagcacatcagaattaaagccgacatcaaaagcgtatccggcaacagcaagaatgacaatctccagaaatgccgtattcagggcaaatatgccgggaaggtcacccatatccataagggcgttgtgtatatccgccttagcaacggtgccaatgccatagcacattcctgctatgatcggcgcagacccggacgaaaggatgatgtcagctttgccgttacccatctggatgaggaacacggcgttgcgctggggatcatcacccgaattatcaagcagcatatttaggatgcgcgaaaagcagctggccgcaaatgcgaccagctgtttttttgtgaattattcaagcatcatgaacgtatcagtgttgtgcctgtgctatcaggccggtagctgaccggtgtgcaggtaacggagaagctgctctctgtccaaatggccgatgccgagatagtccaaatcgaagggattgtcttcaaagaagctggtttcgtgcatggcaccgcccagcacgatcatgctgtcaatgatcggtgtcggtacgccgaactttttgcctaggtcgtggtagatcttgcagcccacgggaatgtcctcggtgatgtagcggtggtcgatggagttgggccccgtattaccctcgtcgcagggtttgtccagcgggaagatcacattatcctcgccttcggagccaaggcccatgtactcctgcgtcaatatgctgcggcgggagaagaaggactcgtaggcatagtccgggatgcggatgccaatcgcatcggcaatggcacattcctcctgatagaattggtactgcacccggcagatggatgggcacagcccgtgagagtacatggaatagctgtcggggtcgttgccatagatagacgaccagttttccatgctcgatacacccagcaccgaggcgggaacgtggatcaccgggttgacattggaaaagccgatatccagcaccgtatctccgggcacagggccatccccgtgggtgacggcgtccatgcagggcaaatatttggcagactccagaaaatcatcgatatccgtcatgggctgcgtcgcgccgcgaagggtaatggcgcgatatttcgcgcctacatggggcattgtaaagccgccgatcttctccagccgcgttccgtagggagcggagctccagccgcccacgatgactttcttggtacagccggcctcgcgcatgaagcggcgcagcagaagcgtggcgtagttatcagtaaagatatgtacgacctgaccgtcctccagcagcggcaccaaagtgcgcaggtagtgctcctgcgcgttggcggtaatgccaatcacgataagacccgcgccctttaccacctcggccatatcgttgctggccagatccagaaacgcgcgacctgaccgctcaaagccgtacaggttccgctgtacgccatccagcaggatgccggtcttatccagattcgccacggccttgggggtgcgggaatagagccgcacttcccgtccggccagcttcatatctgcggcgcaggtctttccgaccgcaccaccgcctaaaacggcaatgggcaggtccttcaggtacgacatatcatgcttcatcaaatattgccctccttctgcttttttgactttatcattatgcacaataccagtttaccatagagaacacgagaattgcagttaaaaaagtgtaaaatatatggcacaccaaaggccacgtcactacatcggcagaggatggcagcagattggcactgttttgcgatttcgccgtaaatcaccatgtgctatacttggtacagtcaaaattgtaaagaccgccgggtggtaactcggcggtctttcgcatacaggaagagggtgttttatatgtggtaggcagagcagcgtttcacgcccgagcggcaaatgcaatcgccgcaaaacccaaataacagtacatagtgttgaaaaaggcgaggctccagtcgtaaatatcttcaaagcacattaaacagtgctgcgatatttacgtaaaggagagaacgcccatgaggagaaaaagaatgcgtttagtttcacttattttgagtgccgtgtgtctgttaggctgcgcagtccagccggcaccgggctcggattcgtccaagtccaacaacatgatctctacctatgcagcaagtcaggccgagcagaacgaagaggagcgcacggtgaccgaatccctgctgccgcaaacagaagatggatgcgatacagctgagagcagcgttgctcctgagcgggcaaatgcatcagagaatgcggataacgccgcagaaaagcaggctacagctgttgaaacggcaccgcccactgcaccgaaagagccggcgacacccgagcctgtggcggaggataaacctgcgcccgcacccacgccggcacctgcacagaatccggcagagaaacaggaggaacaacctgcgcctgtgcctacgcccgaacctacgcccacgccgaagcctgccgccagcgggaacatctactccatcgcggaggccattcaagcgggcaacgagtacgcaagagcgcagtacggcgtgaccatcgacaccagtatgaccgccgccgactccagctacttccctggcacggcggacagcgtggcatggctggcggagaatggcggacagtcggcactgaccgccgccgtaaagggcaacgtggacgccaccttcgcctgcctcgccgccatggacggcgcggaaacggtcagcgcgtatgcgcggttcaactgcaccgcccgctacaatgcggcatcggacgaatacatcgtggtggtgctgtacggataaaccaactgaatacccgaccagaagaccgacagcgtgagctgccggtcttttgcgttgggagaaaggacgagcatgaagagaacaattcctaagctgttgacgctggtatgccttttagtagcaatcatgggcctgtccatcgtgaccgcccacgcagccacggtcacaggcacgatcagcggcggtaacgagtaccgctaccatgaggacaaaacgcccgtgccgcagtggggcgcgtttaccagcacaaagctgaaatactttaccagagatgatacgggcgtaacggtgcctgcctattgcatggagccgtccgttcgctctgccggcggcgatctgagctactcctccaccagttggagcagcctgagctggaatcagcggtacgctgtgacgctggcactctcctatggctacggcggcaactatgatttttatggcatccatcccgactgcgcgcagctggcgacacaggcggtgatttgggagttcgtgtgcggctaccgcggcacgacctatccctacaccctgtatgataccacctgcgccaacctgttccactacgccggcgacggcgtgcaggaggcgtatgacatccttattgaccgcatcatgggtcatggcgtgatccccagctttgctgtgaagtaccgcaatcagctttcggacgccaacgccattacgctgacatgggacggcagtcagtatgtgggtacagccaccgataccaatggtgtgctgtcgcagtactattttcggaccaatatcagtggcgtaaccgtcagccagcggcgtaatgtactgaccgtgacggccacaaaggacgctgcagcgaagctgaacggttatatcagcagcgactacggctacgcactggatgtggagggcacggaggctgtgctgttagaacccagcaacggcagcaactaccaggcgtgtgcggcattgacttcgctgcccgaccctgtgtgggcgtacattcattttaaggtcaaaattgtggaggagaaaggcagcctgaccatcaataaggtggacgcggaaaccggcaaggcactggcaggcgtgacctatcggctatttgatgccaatggtaaaaaggtggctgacatgaccaccggtgcagacggtaaggcagtgttcaaggatcttccacagggcaagtatagctatcaggagatcagcgcgcccagcggctatgtggtggacaacaccaagtatcagatcaccattacggcgaccgcgctgaacattacacaaaagagaaccaacacgcctgccaaggccagtattgagatcgtcaaggtggacgctgataacaaggcaccgctgcaaggtgcgggcttccgcctatacgatacttccggcaagcaggtcgcggagggctatacggatgccaacggcaagctgaccttctccaacctgcggttgggcagctatacctacaaggaattcaaagcaccggacggatatgttttggataccacggcgtactccgctgtgctgaaccaaaacgggcaggtgctgaaggtcactcgcgagaatatgccagtcaaaggcagtattgaggtcttgaaggtggacgcagaaaccaagcagccgctggcaggcgtggtgtatcgtcttttcgacgccgatggcaataagatcgtggatggcacgaccgatgtcaccggcaaggtgacattctccggcctgcgacttggcaaatacttctatcaggagatcagcaccgtggacggctatgtgctggacgagaccaaatacgatttcagcctgaccacagcaaacctcaatatcaaggtcacacgcgagaacgtactcgccaagggcagcatcagcgtctgcaaggtggatgcgacgggcgcaccgcttgccggtgcggagctgctgctggaaacttccacagacggtaagacatggacggaggtcggcagagtgaccaccgacaacacaggcatcgccaagtggagcgacctcaaggttggcgcgcagtatcgtattaccgaaaccaaagctcccgcagggtacaccctcctgaccgagccgctgttcacaggaacgttggacagcaataaccgagacattaccatcactgcctgcaacaatgcgggattcgtcctgccgttcacgggcggaacgggatttacaacctatttcctgtttgcagcactcatgctttgcatgggtgtttatttttgcaaaaaatctgattttatgaaggagacagctaaatgaaaaagatccatcgcgtgttggcactgctgttggcggcgcttatggcccttgggctgatgaccacagcatttgccgcaacagattctgcgcctaccatcgaccccggcaagaaagcatccctttccgtctacaagtacgacatcaccaaggccagcaacgatggcgcgtgggatgctgagtcctacgtttccaccggcctgcatgacgacacggttatcgacaagctgagcaagtacgccattcagggcgtggagtttacctacctccgcgtcgctgacatcgccatgaacaatgaactggtggacggtcagcgtcaggtgggtgtgctgtatggtttcgacaacagtgaccgcagcaccgccgtcttgtctgccatcggcctgaccggcgcagaagcacacaagaccgagggcggcgtcaactacttcaccagcgatatgctcaacaataagctggccgctgccctgtccgccaatgccaccaccgtcaagaacgcgctggaagctgcggtcaagaatggcacggccatggccgagacggacgctgccggtcacacctttgcatccgacatggagcagggcctgtacctggtggtggaaacccgcgtccctgaaaacgtgacctccacctgcaatcccatcttcgtgtccctgcccatgaccaccgtggacggtgcggcatggaactacgatgtgaccgtttaccccaagaaccagaccggcaaccctacgttggagaagaccgtgcgtgagagcaagaactccaccggcaagaataccggcagcctgaccgacatcaaggacggttacgctcacactgctaccgcctccgtgggcgatgttgtggactatcagattatcagcaccctgcccaccatcacgtctaaagcatctgctctcagcgagtacacctatgtggacaccatgagcaagggtattcggtataacaagaacgatgtcgttatcgagttcttcaaggatagcggctgcaccgacaagattgccacctgggcggtgaactccggcaaatttaccgtgggttacgatgataccgccaacaccatgaccatccgcatgaccgataccggtctggcggagatcaacgaggcggccaccgtgtataccgacagcgtcaagcgtggctacagcgactgcaccatgcggattacctacgctgccaccctgaccgccgatgccaagttgggcgataccgacaacctcaacgaggtcgtactgacttggaagcgcaccaactctacctactttgataccctcaaggactgctgccatgtctacacctacggcattgacgttctcaagcagttttctgacaacggtggcaatctgcggaatgtgaagttccggctgcacaacgacaccgatgatgtattcgtgattgccgagcagaaggatggcgtgtattacgccaagggctttgccgccaagaaaaccgacgccacgactttcgttcccaatagcagcggtcacatcgtggtcaaagggctggaggacgacacctattccctgaccgaaactgctaccgacaagggctatgtgctgctgaaggacgcggtcaaaatcattatcaagaccagcgagagcggccagtgcgagaagtgcggcaccaagctgctgaccgcctctgccaccgtcaacggcaaggatgtcaccatgagcgagggcaacgccattgtgcctctgaccgtggtcaataaccccggctttgacctgcctaagacgggcggctatggcgtttggatgtatacggtgggcagcgtcctgctgctgagcatggcagcgtttatcgtcgccaagtcccgcaagcataagaacgagcagtgaagtgctggctactggcggcagcctgcggcgttgcggcgttggggcttctgctttacccattggtgggagaactcttgaatgaaaagtatcattccgatgtggaaaccacctacaccgcagttatcgcggacaccgatgacgccgagctgactgcccagcgtgaagccgcagagcagtacaacgccatgctgtccggcgcggcaactatttctgagggaggggcttctgcccctcccttgccgtatgcggaacaactcacggtgggaggcgtcatttgctacatcgacatccccaagatcaacgtatatctgccggtgcagcacggaacgggcgcggaaacgctggagcgtgccgtgggtcatgtggcagggacttccctgccggtgggcggcagcaacacccatgcggtactgtcggcgcacagtgggctggcgagttccaagctgttttcggacattgaccagcttgcagaggacgatatgttctatatccatgtgctgggtgaggtgctggcatacaaggtagacgccgtccacacggtactgcccacagacacgagtctgctgcaaatcgaggacggtaaggatcaggtcacgctggtgacgtgtaccccgtttggggtcaacacccaccggctgctggtgcgaggccaccgtgttccctacacccccgaacaggaagcgactgccgccgcagaaaaacctgtggcatcctcgtggacgcagcattaccttacaggtcttggcaccggccttggcgtggtggcagtgataggcggcgggtacttcttaataaggagaaaacgccatgcgtaagacatcccttttactggcggcactgctggctgtggcgggcatctatgtcatgctgtggccgttgttcacgggacaaaggctgcaagccgacacagatgaggctgtgcagagcttcctcgaagaacgaaagccggagcagcaataccccgaactgctggcggctctacaagagtataaccgccagctttacgcagaaaagcagtgcaacctcaccggccttgaagcctgcgaggagcccgccgccgacttgactgtctacggcatcgaggacgaggtaataggcgtcttggagatacctgctatggagcttatcatgccggtctatctgggtgcatccgacgctcaccttgccgcaggcgcggcagtgctgggcaatacctccgcacccatcggtggggataacaccaactgcgtcattgccggtcaccgtggatggcgcggcgtggactacttccggcatatcgaccgcttacaggttggcgataccgttacgctgacaaatctatgggagacgctgacctacaccgtagctgacattcagatcatccagccccacgaggtggacaagatcaagatacagcaagaccgcgacctgctgacgctgttgacctgccatccttacgccagcggtgggcgggagaggtatgtggtgtactgcgaaaaactgcccaccatgagccaatcacggtgagcagttttattttgagaggattcagacaagcgtgtcatccagcagaaagtcaatgacgccaatattgagaatgccgccctcatcataccaacgcttgcgaatgtcatgacgcacgatgattttcgggaaggaatcaccggtcagcgcgaaaggcttattctcggtgatcgccttttccgctgttcccaatgcgtaggcagactggatataggtcttcttgccaccggaggttgcaatgaagtcgatttcccgcgcgaccggcacgacctttcctttggtatttttctcgttgccgtagacaatgccgatgtcaacggcgcattcgcggatcatcaactcattgaaaatgatgttctccatgatgtgcgtcatttcctgctggcggaagccgatacgggcatttctcagtccaatgtcctcacagtagtatttgttgggatagtcaaaatagctcttgcccttcacatcccagcgcttgcattcggtaaagaggaaggaatccgataagtgatccatataggctttcacggtgttcaaggcaacgacattttcaccgctacgcttctgcactgtgttgatggcggcagcaaccttcgttgggttggtcagagagccgatagacgaacacagcagatcaagaatcgcggacagcacatcctcacgcttgatcttcttccgctctacaatgtccttcagatagacctcagaaaacagtgatttcagataagccattttcgcggcatccgtgggacgggacaggatcagcggcataccgccgtagaaggcatagtcctcaaaggcatcctgcttatcaccgcctacggctgaatagtattcggcaaaggaaagcggatgcacacggatctcatcgctccgtccccggaactcagtcagtatatcggaggacagcattttggagttgctgccggtcacataaatgtccaagttggacaaagacttcaaatcgttgagcgcgtcgtagaaggtaaccttcttgccatctggattgtagggattcggaacttcgtcggacatctgaatctcgtctacaaaaagataatattggtctgcgctgtgttctacgatctcacggacatgagccgaaagctccagcggattgcgatagcgaatatcacgggtcaagtccaactcaaaggacagaatatgatcttcggtaacacccttaccgagaaggtaactcttgaacagattgcgaagcagaaaggacttgccgcatctgcggatgccagtgatcaccttcacctgaccatcccacatgaaggagatgatttttttcaaatagcgatctcgttttatttccatagcccaacctccattgaaaacttgctggtattatcatgctacatttcaatggatagtatacgacaccgtgagataaaaatcaatagatctgatgaaatgtttgtagataaacccggtaacatttcagcaggctgtgattcaaaccaccgctcctgtgaggtaaagaagcctgaaagttgacaagaactgcgacgcggctgacctgccacccccacgctggcggcgggcggcagcggtatgtggtctattgtgaaagaaccaaatattaggaggatcaatactatgaaaaaagcaatttgtatcattttagctgcggtagctgccgtggcaattatcgtctccagacgcccccgaccccgtggccgcagagaaatttgaaaaatttttcaaaaagtggcgcacttttgatttcgttttacggataatgatagtagagggaattttatggacaagcgtttttaccgatttttacaggcaacctgctgtaactggcgcaacagcttcttcattgattgccagcgttgtgacgggtgctccggttttcttctgtctgtaaatcacaatgccgtgccgtcaatcatccctgtggcggtattcgaggaactgtccggtgagaccgtggataaatatgattgcatcggcattatgacgctggagggattccaacgcttctacaccagctggcttgtctggaacgtagaagacccgaaacggtgcagtttatcccaattgtgggagagctgccaacaatgaacgcacacaagccgaaagaaggaggtgaacattctgaaaagagtcaatatccattgccctaactgcggagctaaggctaccttgcatcctgccagctttgtatatggcaacagtcgtagtgcaggaagctatctgtatgtttgtgaccgctatcccgcctgcaacagctatgtggctgcccatcgcgccacacggcagcccatgggctctctggctgacggggagcttcggcataagcgtatccaggcacaccgggcttttgaccgcctgtggcggtccggattgatgaccaagaaagaggcgtatcaatggatgcagacagagttcggtctgcatgaggaacaggcgcatatcgcacaattcggcgcgtacatgtgtgatcggttgatctgcgcctgcgagaagtttcgtatccacagcgcagaggtcgcatagagagaacgcctaaaaccacagagaaagagaggtgaatctgacgatgaagaatagggatattgcccttactgatgcccagcgcagtatggtagaggcgaatatggacgtggtacgctgggccatccgtaccagcattcaggtcaatgagcagcgctatggtttcggctatgacgatttgtttcaagagggctgcatttggctttgcaaggccgcagtgacgtatgacccggacggcggcgccagctttcccacctatgctcagagggtcgttgagaacggtctgcgtacctattgccggctgcagcacagcaaggagctgcgcagctttcctgtatcggagatctttgacacggaggctgacaattaccgtgccatggcctccggcatccgcagtcttcaggagcagttggctgaggtagatgcgttatcgcttctggaaagcgcgaagcagcaatacaacggtgtcgcacggctgggtatcgaggcgatgcagctgaaatttatcggcctgagcaatacggacattgctgcctactatggcgtcaaggccaactatttgggggcggccgtacatagagccgccgagcggctgaggaacaatgcggagtttttgaatagccttgaatatgagccattgaagaaaagctccaaggcttcgtgaaaaaatgtgaggtgaaattcatgcagaaatactatacggcggtgggtcgtttcgagcgcaaaggccgcatgggcgacatgacctgccctatggtcatcatcaacaaccgggaatatgcattggacatccaggagatgatcctttgggcagcactgaactggcagatcatggatgccggatcccttgagaatgcttattctgccaagctgaaagccagcggcatcagcccccagcgcagtatctccgactgtatgcgccggctgatgcagcgcggactggtggtggagggctgcggcgaaaccgatgaggatgcactgtatgctctgttgtcagggctttacgtggtgccgatctcagacagtctgctgctgcggctgatctcgtttatcaagctgacggttttcggccatgtcccttttgcggttaccaggaagctgtttcgcaaggaccggcgcagcgcaaacgaacggcgggtttatcgtctgtcccgtcaggcactcttatccacggcagaactgatcaagtgtgtggagtatgacatccatacgatccactctgattcgcagctgatggacgccctgtatgcagacgataccaccaccagcgacaatatcgcggatatggtcaggcccttcgtctgctgccgccccgtgctgcaggctgtggcaaacctctatctgcgccgtcagatcatctttgagaggccgtcatgatggacaagctcaggacagcaccgctgcccctgagaagaaagctgctcctcaccgcgttggcaggggcggctttcttccttgtagggctggcagccattttcttttccctcgataccgctacagctctgctcagcggcatcctcgccataggacttgcttttaaaacggcagaactctaccgcctaattatcgccgggcactacacgaccgttgatggctcctgcattgccatcacacagacgccgctccgcaagtaccgcaatatccggatcatagacagtcaggagcgtgaaaggacacttgtactgcctaggcaggacaagatagaggttggccgccgatatcgtttctatttcaaatcctctgcacataaatctcctgcacaggtacagaccggcagcagcttcatagacgaatctctcccgaccgacggctttcttgggcttgaggcggcgtcggattatagcaatgttgacacagtgcgttgattatagtataattcaaatcaagaaaagcatactatgattagaaggaggctgtgatatgacgcttttagatagactcacaacgaatttcggctgtaacgagccaatcttacttgatgagattgactgcaggggctattcacgcccgtggctcttcaaagaactgaacgaattgtgtagaactggtaggctggtgcgttttgaccgcggtatttattatattcccactgagacagcatttggcaccagtctgctcgacccccgcaaagtaatcgagaaaaaatatgtaaaggatagttctggctgttacggctactattccggtgcagctttcttaaaccaactggggctgtcaacgcaaatgcccaataccattgaagtctgtaccaacaacgaaaagacacgttcccgtgagttagctatcgggaagcagcgtgttattctacgcagagccagaagtaaggtcacggcaaaaaatgctgctgtgttgagcttcctggagcttatgaatgaaatgccggcaccttatttctccgaagggaggaagaaactgaccatagagtttatcacaaaaaacggcattacgagacgcgacatcacagaatacgcacctgcgtttcctgataaggctatgcgcactctggtggaaagtgagatcatctatcatgttacacagtaatagagaattgttcgagcaagctatactacgaacggcagatgcgacagggattgcggccagcatcattgaaaaagactactatgtcacggagtttttaaggaggatgacttcctatcagccagacatggtgttcaagggcggaacttcactctcaaaatgctataagctgatccagcgcttttctgaggacattgatttgaatgttgaagaccgtcccagtgaagggcagcgtaaagcactcaagcgaaatattttggcggtagttgatgacttgggattatccctgagcaatgctgaagaaattcgcagccggcgcgactataatcgctatgtgatcaattaccctgcattgcaaggggcaacgtatttgaagcagcagcttatcgttgaaaccgttgtttccatgcgcgcattcccgaatcatcccatggacgcatccagtttcatttatgatttcctgaaagataccggcagagaagatattatccgcgaatgcaatctgcaacctttttcaatcaatgtgcaggcagcggagcgtaccctgctggataagctgtttgcacttgcagactactacctcaatggatcgatcacagagcattcgcggcacatttatgacatatataagttgagtatgatcgtcacgattgatgatactctgcgacaattagccagtgaggtcattctggaacgccgctcgcacaaggtctgcctgtctgcacaagagggggtggatatgaataatctccttcggcagatcgttgactccgatgcatataggagtgactatgagcagattacatccgcactcctttttgaagacgtgtcatattccaccgcaatcactgcgctgcagcacatcattgattctcgtgtgtttcaataaatgtctatatatagaattgcgactcttgacaatcgcaatatatagtgctacaatgcacttgtagttgttctttgtgcatcgcctattcagggtttccgaatacctttcggatcgcacacgtttgttaagattgtaatttagtgccgacatgacagctttggcttattgctgatgctgtatgccggcactttttattatagatatttaagccgtaaggcagaaaggagtgtaatggcaaacatatccgtcgttggccgtattgtatcggatgatattgaactgaagatcagtgccaataatcggccctatttacggttcgaccttgcggagcgtaccggtaagggggcttacgcaagaacgcagtattatcaggtcgttgcctttggggctattgcctcacagttcgccaaaagaggcttgtgccgcggcgcgctgatcagtgtggaaggcacactggaactggaggactatctgaaacgggatggttggacgcgggataagcgtctgaaggtcatcgcgctgcgatggcggtatctccagccctatgacacgaaagtgcctgaacaggtaccggagatcgacggagaacgagaacccttgcccggataggatgccgggtataagaggagctgtcatgtatcaaaaggatgcgtggcagctcctcttttttgttttcatcacgaaaaggaaaggatgtgcaaagcatgaataagaagaagtccatctggtctggcgtatctgtccttatcgcagccgttctggccatcgttgcgtttgtacgcagcgacacgcagatctggcttctgacagccgcatttaccatttgggcgatttgggtcacggtcgcattcgtgttcccttatatacaggaacaggaaaacgaaaagcggcgcgccgcccgcagagctgcctatgacgcacagcggcagagccttcgctcactgtccatagaagaggaagatggcttcggcccactgctgctccgccatgtcaatcacaggatctccgcatatctgaaagcggtgtatccggatgctacatgggaatggcgcagcccggaaccggagaagctgatccttcacggcggtacaggccgtatcaccatctctggtattcccgactatgatcaggcggaagtgacctttgaccaaaaggccaacttctcctgctcactgctgaaggtcacacctgtggtacagagtgcggcggagaacggcacctccgagaagctgcctgctccgccccgtgagatcgatccgcaggtctggttcgagcaacagggacgcaaggttctggatgatctgatctacgacctcaattcccgtggctatagcagccttgtcatcaaggacaacggtgacatctgcatccgtcagggtgacgtagagaaagcgcagacctcattcaaaagcctgccggagaagcattactggccccggctcctgaaggtattcgagcgtgagggcatcgccgccagcatgacggatgatgccatcgcgctgaactggtaaggagggtgctgccatgaaaacaggcttaaccctggagcagcttgccgcggagatcacccggcagcagagtgccaaagaggattatgtggtcaataccggcaatcttcgtctggaaagctatggccccgacctggcactccgtgtgctggacagtgacggcgcagaccgtatcgaaccgctggagatcggggacatcgcccaccggcagatcggtacgcatctgagtatccctgccaagtactatgagcgaatgcgcagcgaagaccccggactactggcacacaatgtcaacacatggctggagcggacacctgcccagcgcatgatccgtgtgctggacggtaaggcacgcgcctacctcagcaatcgttatctgcgtatggacaactacagtatcgcctcagcggtgctgcccatcctggcggagatccccgatgtgcgcattgagagctgccagatcaccgactcccgcatgtatatcaaggcggtcaatccccgtttacaggaggatgtgacgccgggtgacacagtgcaggccggcgtggtcatcagcaatagcgaggtgggcttaggatctgtcaacatccagcctctgatctaccgattggtatgcagcaacggtatggtggtcaacgacgccgccacaaagcgcaaccatattggccgggcaacggatgcggaggagaacttccagctctattccgaaaagacgctggctgcagacgatcacgcttttctgctgaaggtgcaggacactgtccgtgccgccgcagaggaagcgcggttcgctcaggtggtgggcatgatgcgggaggctgcggccgtccccatgaacaccgcagatgtacccggtgttgtgaagctggccagcagacagttcggccttacggactcggagggtgagggcatcctgcaacatctgatcgaaggccatgacctgagcctgtacggtctttccaatgcggtaacacggtacagtcaagacgtaagcagctatgaccgcgcctcagatctggagatcatcggctacaacattctggcaatgcccagaagtgtgtggtcgcggctgaatcaggtatccgcggcgtaatgtgaaaaaacaaaaaagataaaatggaggatcaaaaaatgagttatcctgaaactactacgatggcaactgccagtgcattcaaccttcccaccatggccggccttgatttcggcaacgatgatcttgccgacgatatggagggcttgacgctctcattccccaaggtcaagatcccgtccggcggcgcactgcaattcgaactgcctaccggcgacccggagaatccggagtatacccgttttctgcagggcgttatcctgtatcaccatgccagtggcgcgtattggcccgagggctgtgaatacgatgataacaccgtccctctgtgctccaccgtggacggaaagcagggctacggtacgcccggtggcgcctgtgctgcctgcgagctgaaccgttacgggacggcaacagacggaaaggggaaggcctgcaagaatatgcgtattctgtatcttctgcaggacggtgactatatcccgctgcagctctccctgccgcctaccagcctgcgaccgttcaatgatttcatgaacgccgcatttgtggcccggcgccgtccggcatggagcagcgtggtgcagatcggcttgaagcgcgtggacaacggcaacaacacctacagcgtggcgaccttccgtaaagtagaagatctccagcctgaacaggtgggcgagttccgcgcctttgtagagtcgttccgccagcaggcgaaggagatgctgaagaaccgtgcggagctgtctgccgcccgtgagggtgaggaggaccagtatgccaccgcaaacaccgagtatgctgttgccgacagcggccagcatttctgcatttccggtgcggatgtgatcgatggcgagcgtgaggagcttccccactaaatgaacctatcagaccttataaggatctgaaacatgtgaagagccgcagtctgtgtaaaacacaggctgcggctcccagcatataggaggaactgtaatgaatgaaaatacccccatgaccccggcgcagcagttatttgcggaggagcatcacaatctggtctatgcttttctcaatgagaagaagctgccggaggatgagtattacgatgtggtggtctttggctacttgcaggcagtcatggactataccacgcagggtgagtccagccgtttcagcttcgccaccattgcatggcgcaagatggagagccgcctggcagaccacttccgccatcaggcatctaccaagcgtgcagcgccgacggtcagcctcaatgctgttatggacgatgccggcctgtctctgtccgatatgctctccgcaacggatgagagctttctggagatggagaccggcctgctgttccacgatctgggccggcatatgccccgacgtgatatgaacgtactgcggctcaaggcagatggctacggtacgcgggagatcgcgcagagggagaataccaccgtgcacatggtgcggagtattctcaagtgtgcctattagatcattcgcaagctgtttttcgattcggataatgattgcgcttttcacgaccacacaggtcgaaggaaggagaaagaaaatgaataagaagcaggtcattcttaccggccggttggccgcaccgctctgcgagggcagccgtgcatggatacgccatcatagcggtctggtctgcacctcacgggtcgtccttatccaatctctcactgacagaaaggccgtttttgagaccatgaactccatgtatcatgtgtccttggaaacgtacccttttgcgatggagctgccggaagcgatgtgcgcatagtatgacgaatggtataggagggcggcaaacgccgtcctcctatatccccatctcccagtataatgggtataatgggatcgaaggaagctaacataccgatttatgcgacagtaaagtccggtgtaaatctatgcaccttcccccgataccaaacgtgttaatcgaagcagcacaataagaaataaacgcggagaagcaccgctgaattgtttgacgacagttcagcggtgcttttgtttttgtaggaggacttttaattatgggattactcgataaattggagcaagttgagatcaaggcggattcccgcctgccggaggatgacctgatgttctgcgaaacccagcaacaggcgtatgatgaatcctgccgtgcgctccgtgaaatacgccaacagtggaaaaaagcgattcaggcgcaaagagacctgctcggcatagggcaggatgggtcgctgccctactttgggagcaattaccggttcgggataacggatttgaaccgagaactggagaagttccacagtaggttcatctctgaactcacacagcatttcaatgagaaatatagcgtaacgatctcaacggatgccatcaaagagcatctgatccccgcagagccggacccgtataggtgcgatatggatacgagcaaggagtatcatcgcaatctgcgggctctttcgctgcactatgaagatgtggttgaccagatgttcatacaactggatggactcagttttgtagaacgcgcttttcaggagctgcgtaccaaatgctataaagcggcgcatagctacaacgacaagcccagctacgacagtaaaggggatacacttcgctttggcggatacttttgcacctgtgatgaaaattggggtcgtgaagactggagccttgcagaccgcatgaaggatgtccttgccggcgtggcgcactttgaaaccaatacctttgggtgcaagcctgcgggattctccgagctgctcggttattccgatgtgtccaccccagtgtttcagttcccggactgccagaagctcatacaactgcgcatgttcaaaaatgggcgcgtggatctgaagtttaagacggcgtctattgcaaaggagtttgccgaaacgtatcttgactattcatgctgaggtgtcgtcatgaagtatacaccctcgacagaatcgatcccccagagcagtcgcagagcagttaacgaaaagctcctgtacctgatcgataacaactgctgcgaagcgtatggtatcacgaagcaggatgtttttcagggttatacaggggatgggggcctgcacgggctttcccggaagaactatcggagctaccatacatacagtgaggcaaaaaaagaactggaaaacggccagttctttacaccgcccgccttgtgtcagttcgtggcggattgccttcgactggaagaggacgatctggtagcggacctcacctgtgggatggggaacttcttcaacgtaatgccggtggaagccaatgtctacggctgtgaattggacaccaaggcattcaaggtggcgtcatatctttatccggaggccaatctggttaataaggatattcgcaattatatgccgcaggtacgctttgattatgtggtaggtaacccgcccttcaacctgcaatggatggctgagaatggaaaggagtatctatcacagctctactactgcttgaaggctgcccaattcttgaagccgctggggatcctggctttgatcgtacccaactcatttctggccgactcgttttcggacagctcaatgattcggaagatggaggcacaatttcggtttcttggtcagatcctgttgccggatgatacctttgcgcagatgggtgtttcgcacttcccaataaagctgcagttctggcagaagaagggcgtggattccgaaacaccggctcgctatcacacaggaatggataacgatctttccggcggcatctatgctggtgcagcacaagcgatccacatgtcgctgctgcaaatgccaaaggccatgctgaaggaaaatcgcgccaagatcctgcgggaactggcaaaggagcgtcaaacctctgcatcgtttacttatacggtagagaagatgctgtaccaaatcaggatacatccgtccctgaaggatcggtatgcccaatgctgcgcgtatctgcatcgattctatacggagacacagccgccagagatgcgatatgaggaatggtgcaaacggcggttgaccgaggcgaaggtactgcattatcttcgtcagacactcagacgtcagaaccggcagccggaacgtgatgagatccaccttgtcaagcgggattattcattcgcctataaagggtatagtgccgcagtgcgacgccgcatgagcgaagagctgcgccaacctatcccagtctgtgaagcagtgctgcgcggtgaaacactccccggttacgaacggctgctgcgtaaaaagcggcatgaatacctgatccagagccagccttttcaggaaatgaccccggacacgggaattgggaaatggttggatgatttctggttatgggatgccgagaacgaggaggagatcctgctgaacgatacccaactccacgacctgaatcttgctctgcaaaagcgctatacgctgctgcaatgggaacagggttccggtaagacgctggctggcattgcctatgggaaataccgcatggacagacaagggtatcgtaacacctgggtcatttcatcggccatctctatccgcaataactggaatgtggtgctgcccaactatgacgtgtcgtatgtgttcgtggaacggctgagggatctggagcggatcaagcccagcgactttgtgctgatgaccttcaatgcgctgtgcaagtatcgcaggcagatcaaaaaatggctgaagatccatagccgcaagacctgtcttgtactggatgaaagcgatgagatatgcaatccgtacagcagccgtgccaaggcggtgctgtcctgtttcagacgatgccaatcaaaactgctgaccacaggaaccagtacccggaacaacatctctgagttcgcaccgcagatggaattgctttataacaattccatcaatatgctatcctgctgccacaccatctatcactatgataaggacggcacggcgacacgagagactaacccgtggtacggtcaaccgatcccggcctatcgtcgtggctacacgctgtttgccaattcacatctgccggagaagatcaccgtatttggtgtcggacagcgcacacaggacatctacaatgcagatattctgcgcgatatcctcgccaagacagtgatcacccgtacctttgaggaggtcaccgggaaggacatcaaacgtatccatcaagagctcattccgttttcagcggaggagaaggccgtatgggtacaggcggtcaaggagttccataccatgcgccagaactatttcacctcaacgaataacgcgaggaaagacgccatgctgcggatcatccagcagatcacgcttttgctgcggatcagtgccgcgcctaatacggtttcggagtatagcggcgagcttcccgggaagctgcggagaacgatccagcttaccggcagctgggcagaagagatcgtggccataggcgtccgccataccgtggtgctggacgcatatgcggcagccctgcgggaagcgtttcccaaccggccacttttcattgtgaccggcgcgacgactacctttgcgaaacgcagggcattacggcaaacactccgcgagagcggaaacggcatcctgctgtgtacgcagcagagcttgcccagttcagtcaacttcgagttcgtcaacaaagtcatcatcccggagctgcactataacaactcccgcatgagccagttttacatgcgcttcatccgctttaattccgttgactggaaggacatctatttcctgacctatgcacagagcattgagtccaacctgatgcagatgatattggcaaaagagaagctcaatctcttcatgaagggcgacgaagcagatatggatgatatttacgaacgatttggagtggactacgatctcacatcgctgctgttataccgcgacatagatgaagacggccgtttcagcattcgctggggcgaacaggaaattgcgtaaaggaggtagcgagcattgaggcaaagagaaaccaaggcggaacggttcgtgcgtgtggctgaacagcgcacacaacgagccgtagacgctatccattcgctttctaattgtgcaagccgtgtgtgttacgattacacgccggaacaggtagaacagatcatagcggcactggaggtggaagtaagacgcctacaaagtgcatttacgggcgaaaaccgctttacactgcgcccataagtcagaggccccggatgatttccggggcctcaaatataagtcaataaggagtataaacatgaaaagagaatctgccccgcaggagtatacctgtcggaattgcccgaaacggtattaccatgcgatccccgcgccccagaagtcaaagggactcatgatgcactttggcgaaagctattgcaccctgccgaagagagccaggcatcttaaaagccgtgatctgaacagacgggcaccggaatggtgcccgaagcggaaagtgccgaacacgctgcggatctactattaccgcagcccggaaacgtatatgttggacaacgtgctgcatcagggctttgcattcacaccgctgcccacggcaagccgctatgcaatggcatatgagggaacttccacgctctccccgcgggagttttggctaaagctgctcacacagaaggatacggagctgttaggcatagaggtcaaagccaagtccgtagtagagatagacgatgggcttgccccgtgctttttcttcaaaacggaagacggctatacgcgctgtcagtgcttcgatgctgatcgcgcacgcaccaactgcatggaaggctgggaggaatataatcaggaggacataaaatgatcatcaaccaagagggtatgcgctatacatacaacggcatgacctatactgtcggtgccgctgtcatggcaacagaggcaagtgaatatcgtggactttatggcaccatcacggagatccgtgacggatctgaccgagagacagagaatgatacgcctgacatctattgctgttttgaaccacctctgtttcaagaggagatccgggagctggagcgacgcttcacagaactatatcaatcgcctaagaagctcgacgagatcacactggatatggttatcatggcatcggagatggttcgggtgatctcgcctcatccctcggtgtgcaagacatgcaaggtctagctcctcacaatgcagtttaccacaagctgggattcgggctgcattacagagctgtacgccgactataatatggcgcgttttgctatgctgaagggcatccgcgaagaacaggcagaaggctgcgtaaaggattgggcagagaaggatgctctggaggaggaatactgcacagatttttatgaggcgtggcatcgagatgaatactctgagaaacactttaccgcatccattgaaaagctgtcccttacattgccacaaagaattatagaagcggaatgaaattatgattgaaattattataatttggagtataataattgtaaaggtggtgatcgcatgcatgtatttgttgatcgacagcaggagatggagacgctgcaaagtgagtatgagcggaacggcagcgcacttgtcgtactgtatggacgccggcgagtgggaaagactacgctgatatccgagtttattcgggataaaaacgccctgtttttccttgcgagtgaagagtccgaagcacaaaaccgagcggcattcaaagagaaagcggcagaattcattgatagtgatcttctgcgtaatgcagatgtcaagagctgggacgtgatattcaaggcaatcgtggatgccaagcataacagcaagcccgttatcgtactggatgaatttcagtatctgggcaaagcggagcctgcgttcccttccattttccagcggatatgggaagagatattaaagaaccagtctgttatggtcattctttgcggctccctgatctccatgatggagtcccagacactggcctacggcagccctttatacggaagacgaaccgcgcagatccggctcaagcagatcccattcgcctattaccatgagtttttccctggcaaaacccgcagagaactcattgagctatactctgttacaggcggtgttcccaaatatatcgagttattttcggagagtagcgatatctatcgtgctatccagaaatgcgtattgaaccgctccggctatctctatgatgaaccgcattttttgctgcagcaggaggtcagtgaggtcggcagttacttttccattatcaaggcgatcgcggctggaaaccacaagctttcctcgattgcctctgtgttagaggtcaagtcaacgaacctgaccaagtacctgaagaccttgatggatctggatattctggaacgaagggtgcctgtcacagaggaaaatcccgagaagagcaagcgcggcctttacaagatcaaggataactatctgcggttttggttcgcatttatctatcccaatatgagctttatcgaaagcgggcatagcggtatcgtgatggataagatccacaggggactcactaccagccacattggcttcgtatatgaggacatctgtgaggagcggatgtgggaattgaatgttaataacacatggccgttccagttctccaagctgggtgggtattgggatgccaagaatgagatcgacattgcagctcttgatccggagggcaagaacctgattttgggagagtgcaagtactggaaagaacccgttggtcttaatgtccttcatgcgttggaagctaaggcctgcgatgtcgcatgggagcgggatcggcgaaaagtgtggtacgtcctgttcagtatctccggcttcttggatgagctgcgcaatcatgccgcaacacgggacgatcttcttttgattgacgatggagaaagatagctgatcgaccagccggttcaatatcttcaaaacgccccaaaattctttgagggaattaaagaagtcctgacaaatatgtataaaacagacgtggagatttccgcgtctgtttttttcctatctgttgcagtaatgcgtattaaagtcgtataaacacagtataagcacaaaagagaaggagctgatcttatgttagtctgtgtagaccacggaaataaacaaattaaaacagccagtggggtatttacatccggactggtagagagcgatacccgtccccctttcggtgacaacattctattttatcggggaaaatactacacgctctccgaccagcgtatcccctatacccgggataaaacagaggacgaccgattttttatcctgacgttgttcgccatcgcttacgagatcaacacggcgggccagtatgtcccggatcggctgatgaacattcagcttgccgttgggctgccgcctgcgcattatggaacgcagtataaacgctttgcccagtatttcctgaaccgcggtgtgatcgggtttgaattcaatgggaggaaatactccatctgcatcacggaggcggtctgcttcccgcaggcgctggcagccacggctccggtgttcaagcggctccagctcggcacggttgccaaggccactgtgatcgacataggcggttttactgccgattacctctccctgcgctatggcgcagcagactgggcttcctgcgattcgctggaaaacggcgtcattacgctctataaccgattgctgtccaagattcgtgccgaccatgatctgctgctggaggaaacggacattgactccattctcacaggttgcagtacagagtacggcagtgagatccaaacactggtagagcgcggcgcggagtccttcgtggcggaccttttccgtactctgcgggagcggaagatcgagctgcgtaccggcaaggttatttttgtaggcggcggctctctgctgcttcggaaacagatcgaaaagtccggtaaggtcggtacagccatctttgtggaggagatcagcgccaacgctgccgggtacgggctcttgtatgcagctacgaagacgagtaggtgatccatatgggcgaaaagaaggattccttcagatttaccgtccaattcaatgccggtgacccaagccaccagcaggtagccgcgatcttgaacgagcagggtcggcgcaaggcacagttcctggtcaacgccgtgacccactatatgaattgcccggaaacaccggaggccgcggctgcgccaaggatagaccggcaaacagtggagcaactggttcgtgagatactgtccaatatgcacccggaacccgtacccgcaatgggcgaggatatgcccggctgcgatccggctattacggcctctgaagacatccccttcgatgccgcagccatgctgggagaagatggcttccattcgctcatggactcattggctgcgatacagaagccgtgaaagcggcaggtgatcatatggagcatacttcggcatacataaatttccaggagccagactgcgcgtattacgcagcctggctcctgacctgtaaagagacaatggtcgaaagtaagccagcactttcagaccggtagaaatcgccgctcccgcatgatatgataagcttgaagaaaagttttcctgtccacgcaatgaatggttatttttgttgtctatataagtgaaaggcctttacgcagaaagaagggagggcgcaatgagagaccatgagatcatagaattgtactgggcgcgtaacgagagcgcgattaccgccaccacagaaaagtacgggaactactgccatacgattgcatataacatactgcgtaacaaagaggatgcggaggaatgtgccaacgacacatatctcggcgcatggaattcgatcccgccgcagcgtccgagccatttgtcgatctacttagggaaaatcacgcgcaacctcgctctgaaccgttataagcggtatactgccgaaaaacgcggacacggacaagtagtcctcgcgctgtctgagctggaagcctgcgttccttcggaaacgactgtggagcagaccatcgaagaaaatgagttggctgccgccattgaccgcttcctgtatgcaaagcccaagctgaaccgtaacatttttgtccgcagatactatcatctctatgcaatacgggatattgcggacgcatacggaatgagcgagagcaaggtgacgtctttgcttttccgtatgagaaacgaattaagacgatttcttgaaaaggagggaattatgctatgaaaaccgaagttcttcttcgttcgatcggaaagatcaatgacgagcttatcgctgacgcggaaagcgaagcaaataccaaaagaaagcccggctgggccaagcttggaacaatggctgcctgccttgcactggctctctgtactggcatcgccacacatgccatccgaagcaatgcgacagcaggtaccttcacaatggatgtcaaccccagcgtggaatatacgattgccaaaagcgggagcgttaagaatgtccgcagtctgaacagcgatgcggaaaatgcgctcagcgatgttgcgctgggaaagcagagtgtcgagaccgctctaacgcgcacggtcgccgcctacgaggcctgcggatacatggaaaacggcgaagcgacggttctgatctcttttgattcccgtcttgatgcgaacgccgagctaaaggcatcgctctccgcggagatccagcaggccctggagcagaccgatgccgtcggcacgctggttttccactccgaactgacggaaaacgccgaagtggcgaagatcgccgaggaattccatgtttcccttggccgcgccgactggatcctcaccgcagcaaacaaaaccgggctgcccacggacgaggttgcccgcatgtcgttggacgagcttcttaaattccaagaggtctccggcatttcttctatctgcgtatcgaagttcatctccttggaggaagcgaaaaagattgcactgagggacgcgaagcttgatgagctgacgcagaagatcgtgttcaccagagaggagctgaaccgcaatcagggcaaaccctgctacctcctggagttctataccggaacgaaccagtatcattaccagatcgatgcaaagaccggtagcatcatctacgccggaaggttcatcacccttgccgacgcgaagaaaatcgcactggacgacgccggggtcaatgtgaaggtggtcttcacgacagaggagctggttgccggtggcatcaagtcaccctactattacttcgtctttgaaagtgactcagctcgctggacttacaaaattgacgccgttctgggcgtgatcatggataagacctgcgataagatcattccccttgctccggagtttatcggcttggaaaaggcaaagcagatcgccctgaggggcgcagggctggatgaggcagcgcagaaaatcgtgttcacccgagaggagctgagccgcaattcgggcaagccctgctatatccttgagttctacaccgcgaagaagcagtattcctacaaggtagacgctaagaacggcagcatcatggagacttaccacttcattcttctggcggacgcgaagaaaatcgcactggacgacgccggggtcagcgaaaaggtcacctttaccgaggaaacgctggttgccggcggcatcaagtcgccctactattacttcgcctttgaaagtgcctctgctcgctggacctacaaaatcgacgcggttttgggtgtgatcatggataagacctgcgataagatcattccccctgccccggagtttatcggcttggaaaaggcaaagcagatcgcattagaggacgcggggctggatgagacagcgcaaaaaatcgtgttcaccagggaggagctgagccgcaattctggcaaaccctgctatatccttgagttctacacggacaagtgtgcgtattcctacaaggtcgatgcagtatccggggaaattatcgggaagaaaagcgactggttttcccgtcaggagtccgagactgtgccggacacgtctcagaattccgattccaagcagcgcagaataggttaacccacgataagggccttttgagaaagtgcgtacccgcagtgggcgaggatatgcccggcggcgatccggctattatgacctctgaagacatcccgttcgatgccgcggccatgctgggagaagatggcttccattcgctcatggactcattggccgcgatacagaagccgtgaaatcaacaggtggtcatatagagcatacttcggcatacataaattgtcaggagccggactgcgcgtatcacgcagtccggctcctgacctgtaaggagacaatggtcgaaagtagcctaaattggaagtaagatgaagcctttttatttggcgatacgctccaggatttcgatcagcagctcggtggtgatcttgacgtcctcgatcttgcaggtttcattgggcgtatgcacgtcaagaagcgtcggaccaacggagatcatgtccaggtggggattcttctccgcaaaggcgccgcactccacgccggcgtgtaccggctccacgatcatatccgtgccggtcagatgcttgtaggcctcgcaagcgatatgggtcagcttgctgttgggattgaccgcccagccgggaacatgaccctcgctgtcgaaggtgaaaccgaagctattggccagtgcgctgcagatcacaccgatctgagtggcctgataggcaacgctgctccgggcaaacaccgtgaagcgcaccatatcctcgtccacggacaccacacccaagttggcggaactttctaccagcccgtcaatgaacggactcatggtatgtacgttattgggaaccgtggtcatcagccctaccataccataaccaacctcccctgtcagtacgcggtcgggcgcggtatcaccgaaggtggtggtgaacaccatatccgattcgatgttgccaaaagcctccacgaactctgcgcggaaggtttcaatgatagccttggccctgtcctcctcggtggcagacagaacaatggtggcggtgccaaatgcggggatggcgttcttcgcctgaccgccgctgaaggaggccacgcggtagctgacgccgccctgtcgcagcatagccagcaacgtagcgatgctgaccagcgcgttggcgtgacccttgttgatccccacgccggagtgaccgcccagcagaccactgagggaaatggtcagtgtcttgcagcccacaataggcttttcccactcggccttgtggctgtagttgaagaagtcgccgccggcacaggaattgcacagtgagcccagcgtttcccaatccaaattgaccagatagccgccgtcaagatacttggggtcaatggcgatggagcccatgccgtcttcctcgttggtggtgaagatggcgcggatggggccgtgacgcagggtgtcgtcctgcagcaggtacaggcacatcgccacgccgataccgtcatcggcacccaggctggtgccgtctgcggtcagggtcacaccatcgttgatgaccttgatagggtcgttcataggatcgtaggtgacgccctcttcgcatacgcagaccatatccatgtgtgcctgaaagatcacacggggtacattctcgcagccgggggaggcgggcttgtcaatgatgatctcattcatgttgtccttttccacggccatgccatggcttttggcccactggaacaggtactcgctgacacgctcctcgtgatgggaggggcggggaacctttgccagctccagaaattcggacaatacaatatctaacgctttgtctttactcatagcaaacactccttactgtgcgacagagccggcttcttcgatagtcatatcgccggagccggccagcttggtattcttcagcagggaatagaggatccagtaggccacgaaggcgatgatcacgccgtccagtgcggaggagaacaccgtcaccacgcccagcgtctccagcagcgcgaagccgccgccgatgacccacgcgatgatgccgatccagttgatgccgcgcacgggagaccagttctccttcttggccttgcagatgacccagtagtcgcagataacgacgcccatgatgggaggcaccaccgcgcccagaatgctgatataggtgttcaggaaatccgccagacctgcaatcgccataatgacgcccagtacgccgcatatcatggtgaccagaggacgcttgctgtccttgatggagaacatcttgcaggcggccagaccggacatataggcgttgccggtattggtggtccaagtggcgagaatcagcaccagcatggcaacgatggggggaatatccatggaacttgaaaagaagtatgtgccggtgacagtgcattttgacgccaacgggaagatgcgtcctatcgagatcgagtttgacgaaatgcgcagatatcatatcgacaagatactggacgtgcgccgcgcagcctgccaaaagagatatacctgccgcatacggggcagggagagttatctctggtttgaaaaaggccgctggttcgtagcagcgaaggatggaaaataagaaggaggctgccggcaacgccggcagcctcccttgcgtagagaaaactacttaccaatacttgggatacttgctggtgctctgctgtttttcggcatattgccaccagggaacttgggtggcgaaatccgtcagcttatcccagaactgatcggccagcgtccccttgtccacgtagaccgtgacagtataggtcttgctgctgccatcctccatggcggcggtgtaggtcacggcattggtgaagtccaccgtttcaccgttaccgggcgttagggacttgacgccgttggtggcgataaccggggtcagcttcgtcacatctgtgccgcggggcatggtgatggtaatagtattggtgctgttgttcaccgcgccggccacaccgttgatggagaagctggtgatgcccttggcggtcgtggtggccgtctcccactggcaggtgatgttgatgtcaccggcaggcatcttgaagcggttattcgtgataaccttgtccatcggagccccacccttagcaaagccatagcacagggagccctccaccatctgataaccgctgtcgggcgttacggtgacgataatctcatcgccctcgttggccttggtgcggttggtggtgatggtgccgcccttgggggtgctcaccgaaatggtaaacttgccggtgtccggcgtttccgtgccgccgccataggcggggatctcgattttcagggcagcgctctcaccgccggaggcactcaccacaacgatgtagatgtcgcgggcatcctcggtcagattactgagggtgatgtttgtctcgcccgcgctggctgtacccttagtagtggatttcttgatctcatccactgtgggagctgttgcgccgtgggtcactaccttgtagaagtaggtgcctgcctcattggtggtaaacgtcaccgttgcggcggtcttgctgctgcgggcggcggagcctccggacagggtcggggcgttgggagccgcagcctttttgatggtaatggtataaatattggtcgtcgtgccatcttccgccgttactgtgaatttggcctgcgtatccaatgccatcccgcagggggcgccctctacccaattcttgtccggatcgttttccttggtgactgtggcaaattcagaaatcgttagcttcaggatcatgtctgccagatcagtagtgtccgtgtcggcaggcagcgtgatcgtgtagttcaagccagatttgctcaacgtaccgatcttcttttctccgtcatagagccccacaccggtcaactggcaaagattactgttctgtgtctcgtcgcgttcaaagtttgcggtgataacaattcccttgccggaagtaggtacagtgaacgtcgcaacattgggattctcctccgaagacgtcagtttaaagtcaactgtgctgccgtctgcgtaggccgctgtccaactcgcgaacttatacctgaacttcgcggtagcagttaccgtgaccgttgttccttcgataactgcggcgctgacaggtttaccatctactgtggcggcagcgctgcccattgccgtatcgttggagcccattgtgatcgttgagaatgccttcgctctgtacttggctacgacgctgatgctggttgcattctcgggtacagtaaactgacaaccgtcaaagtcgccgatcgtataagagatatcagcaccatcctgatccttcacttcatagccttccaaaacaaattggcttgttccggttgggcgaacagctagcgtagcccccggcttgacggtatcctcgtgagaggtaaaaggggtcatatagttgccttcggtcatgctgacaaggtctacaccggacagcgcatttgcctgactggcagagaagctcagcttcacaccttgcttttcaaacactgctgtcagagatacctcattctccggcatttcaaaggtcattgtggcggcagactcctgctctttggtcagttcaacacccttcgcatcccagcgcacaaatttgaatttatacgctgcatgctccacgggagtggccgttaccgtgacctcgttgccggcatgggcgtcgccgatcgttttttcgccgtccgtaaccgtcacagttcccataacataaatattttcatcgcgatatctcatcgcagatgcggaaatggtgtaccgttccgaagtatcttccttgaaggtaatgcttgtgacctcaacacagtcattgggcattacgaaagagaacgtgttgccggtaatcgtaatgtcactcgcagaaatagcagtcttatccctgcttttggtcagcgtaaccttatcaatgaccatgttcttattttcaccggtcggcttgatgctcatggtgaccgcccgatcagaacgaatatctttggtaacagtactataggccttagacaagtcctcatatccgctaagcttttcggtgcccgccgacaatgcggaaaggtcatagcctttttgcggaagcactttgaattcccacggcatatccaacctaacagtatattcctgagattttccctcaagatttgtcaaggtaaacgtatcgcttccattcgtaaagttcaacttgtctttggaagcagtcgttccccatgtaggaatgattttactagtcgtatcccaagatgcatagctgtcgatatattctgcggaagaaaatacaaatttagtccctgtttcgtccgctgtccaagtatcaggatagtgtgccaaaagctttgacccaacgattttgagacgataatagtagagatgttgtatcgtcttcgtagcgagtttttcttttacgacaaaaactctcatatagttttcgccactgtcgagaataatggcgctattcgaggcattgataacattattatcagcatctttaacagcgttaaaaacacaatcgttctttgggttcagcgaagaattactcggcgcagcaagcaaagcatctttatagtttagttcgatctcacccaccagataatatttctttttttctgtatctgtctgcccagggacactctgcaattcatcataattgcggatcgtggcatctgcagatgtaaatgtaaaatcatcattaccggttaagtagttatatgcttttggaaccagcttatcttcaccattggtatctttaaaggtaaggccgccactctctttcagttgtggccgagtaacctccgtggtttctccctcgtcagcatatgcctttggcgcagttacgacaaagaagctcatgaccatgagcaggcaaaggaacagtgatactgccctttgccattttttggctttcatggctctctcctttctaattaaaatggtgtccgtagctggtctggtgatccgctacgtcgctgttctctgccaccttatcccagagctgctgggaaatgctgcgctcaaagataacggtgacggtataatttctgctctccgtacccagcgttacggtataggtcaaaggactggtgagattcacgacctcgccggataccgggctgaccacagctcccgcagggacggtaacgaccggcgcaaccgccgtgacattcgttcccaccggcagcttgacagtgatggttcctgcactctggtcgatctcaccctccacacccaggacggagaagcctgtgatcttcgccgtgctgctggagggtgtatcatcgtcgcctccgctgctctttgcagagatcggctgaccacttttgttcagcacagtaacggtgtaggtgcggcttgccaaattgttgtcgccgcccagcgtaaacgtggctgcattggcaaagtccactgcaataccggaggtcggagaacaagtcctgccggtaaattcgatgtccgtgaccagcttggtgctggtcagcttggaatcgtccacaccggtgacagtaatggtgctcttggcgttgtcgatggtgccattgtaccactcgtcgcctgcctgcacacggaagctggtgatctccgcctgcgccttggacacgaccttgatccgataaacattctgcaccgtctcgtcgccggaagtcacggtgaaggtcttccagtcagagaagtccatcatcgtcttgccatccaaagacggggtggaggttgcctcataggagatgctggcactgagatacatcttcgaggtatccacaccggcactcaccgtaagcaggatctccgttgcgccatcggacgccttggtgatcttcttctccaaaatgtccgtcaagttcagcacgctgtttttcagtttgatgctgttgacatccagttcggcaccggaagcccccacatcaccgtggttcacggtgacataataggttttctgtgtcttgccatcctctgccaagacggtaaacggctgttcaacgccgtccacaaaggtcgtgggcaggttcggggccagcaaggtcgcaccttctaccatcgtcaccgtcggagtcaagttcgtcaggggcataccgtcgggcactgtgaccgtgatggtattcctgccgctttcaccgccctcggtgataacgcccttcttgccttcaatctcaaagtcggtgattgaggcatctgtggacagttcacgggcaaagttgaaccggtggtaatagaagtagcagggatttccctgacctttctccaggaatttgagataccactgactggcatagcagccttcatacgtcgccagtgcgttattccttatgctggtcgtgtgatggaagtagccctcactgacgttggcgaagttgtccatccagttctggagcatgctttttccctgtccgtcagagaaccggggatcagtatggcagtcgattcccatactgcaaaggcccatcatgacccaagcggcagactcgctgtttacgtcgccccatgcctcgaacgagaaagaactgctcattttctggagaatcgtctcaagaccctcctgcatcttagcctttacgcggtcaccataaacgggatcatcctgatacggaccgatcgcatacatgatagcacctaccatgtcgataccaaatccatccgaaagatacttgtgaccaagcagtgtctccaacagcctctcccgcgtccagacggcattgctcggaatggtgtaaattcccatgtccattgcgagcaacgcaaatgtggggccgttgatcgtataggtgccgctgtaattgtagagagctgctgccagatcatcgacattattgccttttttgtcgatataaggcactccgtcatgatactgtgcaagattcgtgcaatcgaaaccacgcgccgtcagcatcataatcgttcgaccaagttctgtcatggcaacgctggtagtcgtatcaagctgcgagatgatttttcccacatcgaagtcgttgccttgacctgcgttatagttgggagatatgttctcatagaagccgagattcatccactcccagtcgttgttagccatggtgcgatagcggcggataatgttggcaacgaccttttcaagatcacccttgtaggggtttggcagtgtttcatccgacagtgttaccgtcacggtatagctgctggaagagccgtcttgtgctgttaccacatactgcacaggctgggagaagttctgtgcctccgttgcagagggagaaatcgtggcgaattccgacaagacaatcttcggcacgaaggtcatcggtgtgcctcgaggaacactcagcgttatgcttccagccgcctcgttgatttcagccgcatagccgccgtatttaaaagagaggatactgcatccggaggctgccggcgttctggtaatcgtcactgtatagtcctgcttattaccatttgccgccgtaaccgtgtagcgattttcgcccacctgcagtgctgcaggttttgccgtgaccgccgcaaattcggaaaccttgatctccggctccgtaacggccagatttgttgcataggggatctcgattgcaatgtcattaccatcgatcacaccaatcgcatcaccgattttgtaagacaggatatcgttttccgccgaaacctttgcggtgaccgttaccttgtatgttgtttccagttcatactcggaattgtagatcacaaggtctatcggctgggattctgaattggtgaagtcgatggccgtatcctcgctggcaccatccaggcggtagtattcgccggtgtgctcgatctctggcagcagtgcggataagtcggttccaacaggcagattcagacggatcgttcccgcctcgccgttttcaccttctacgatcttaccgtatcgtgttacatcgttcactgttactgcgaaggatgttgcgcggttgtagggtgttccgttctcaacggtaacgagccaattttcacttaaatcaacgccaaaaacgtatttgtccagattcttgccgttaaacgtagttccagtcgcgcaatcccacggcacaaccgtgtacagcatctttccagcttccagacttcccgcaaagtaagtcgctttcacaccttgtggggtctcaatgacgggttcgggcagctgtgtccaatcggttgagtcgggaagccggacagttatcgtcttatttgcctcatcaacaattccctttgaggcacctactgagaaagccgtgatctccggtacggcgatcacgcgggatctgaacagatcaaggaaatacggggcgacaacatgcagaatgaattccaactgctccacgccccgtgcagtgatcgtactgggtgttgtatacggatcatcccacttatattcattttcccaatagctcttaaggccctccagtaaacgctcgtctttccatccctgaccggaaagctggtactcgtgtgtatatgcaaagccggtggtaatgctgaaagcaccctggatgccggtagctacttttacaagatagttcagatctgaaggataccattgtccaacatgaatgctgtccgcattctggatcgagcagtaatatgtaaacagatcatcaaactgatgcatgaccttgtagatttccggtgcgagcttccacagttcggcctttcgatccaactgcacggaatcgtccgcgctgctggaaaaagcccaaaccgggtaatagtagtgaatggaagggtcattcttgttgtaaatattccactgctgcacagaggaataatctgccgtcggctgcaccgcttcaatgcgggatggccaagaaaatgcattgatatttgtccgattgtttgtatagaattcgaccggcgtaaaaacactcgtttccgccgcatccgcatcgatcagaccgccccaatttcccgcaacggaaatgatattgatctcagaaccactttgatctgtaaaagacaaagggattgtttcgtatttgcctgaaacaaaggcggtaaaagaaggccatgtggaataccagctagggtcaaaggcataggtcttacagggaagcagtgcgaacagtattacaagagccaacaaaaggcagggtaaacgtttcttcatgggaatcctctcctgtttgtcatgcttttcgcaggggggcgggcaaagtgcccgccccctctgcggtgccttgacagttaatctgtcagtttaagctcctgcttagtgccaataaataccgtagttcgtcgtatagaaccaggtaatacgagcaccgtcagtcagcgtgtagtcggcagcacctacattggggatattgcaggtggtgctccagccattggcactgtccgtatacatccagccatccgcaccggtagtgtcaaaggcagccagaccattgatagaggccacataggtggaagaaggatcatactcagagtaacctgcgctctgcatgaaccgctgcagaacggtcatggcacttgtgttaggatcaactcgaatggtgccccagggctgggcagaggtaccgccgaaataagcagctgcagccgcggcgatttcgtcagccttggttttcacagttccggtgtaccactcagtgcccttcaactcactgaaatcgaagccaaaggtcacgctgatcttgccatcggaggcaaacgtcaccatcataacataggtgcgggtattgccatttgccgtaaccgtcagtgcgggagtggtaacactcaggttcatggttgcggtcacatcggtcgtaccagagacgttactcacattgccgcccaaagtcgcagcggcattcttggtaagagtggtagataccgccgccgtattggaagcggcagggacattagttgcagagatgtaatagttgcagaaagtccagccattctcagccgtattggtgttgccctcgaagtaggggttgcccatgcaaggattctgcacagtcacacgatacacgttagcagcagtcgttgcgccgttgaataccacattggagatcgccagaggatcagtggaaggaatggctacctgagcctgattgttgtcgttgataccggcagcaaggatataggggttctcattatcatggccgtcaagaacaatcgtgtaagacttattcagcaagtcaacaccattaatggtgtagatataatctacatcatcataggtatacccagtacctgcgctcaacaaggtgccgccagtaatggtggtttcatcttccatcgtgatgataacagtctgggattttaggctttcttccgtagtggtagcaggcaaagtcgcacgaatgaacaactgtgaatcatcataggtgggggaattgggattgccgtatccatccacctgatagacagcattagtaccaccaatcgttaccaactggatctcactgggtttgcttgtggtttttgcggcaacgggcttgccattgccgtccgccatggcgatagtgctcagcgagagcgccatcaccagggcaagaaacagggatacgagtttcttcatttttgttttcctcctagaaattatattttttcaccgagattgctctcgggtgaaaacaaaagtaataatgtacctatcgacaggcataaaccataattctattctaattcaatctggaagctataggtctggctcaattcaccgctggttactaccagatcacggtcttccagcgccagattcaaaatgaaccgtccgcccagctcgttcacaatgcaggggctatcatctatgtccaacaccgcatccggggcaagctctacatttgcggcacagtttttgaaatccgtgtccgtcggcagcgtaatggcgatcacatagtgcgtctcatcattctctgtgtgggtctggatctccgccgtactgttgccgatcacaaagctgcggatcagcggctcctcattggcggcgttcgctttcccgcagcccgccagacacggcaggatacagagcacagccagcactatgcagcatatcttcttcatatcgttacctcactcagagcggatggcttcgttgggactgatcagtgttgccttgcgggccggcatccatgcggcagcaatggctacgccgcctgagaacagcacgccgcagaccgccagccaccagggcagcacgcaccgcaactcctgggacgcgaagatcaccggtatcagccacttggcgataaagctcagtatcaggccagccgcgccgccgatcacgcccacgatcagcgcttccgtcaggaacatcttgaagatgtcgccccggatggtgcccagcacctttaatacgccgatctctcttgtccgctccgtaatggacatcatcatggtgtttgccacgcagatggcggagatcagcacggcgatgccgcccagcgcgcccagcatcccctggatctgtcgggactgtgtccgcaccgtctccagcatatcgttgagcgaataggtgttcagccccgtgtcgcgaatcagcttgacaatacgctgcacgtcgttgacgttcttcaccttcacccaaaccaagtcgtaggtagggccgttggccttttcctccgccgtcttggtttgagttgtcgcgcccatgtaattggcgttggcctgcgtcatctcctgcaagcggtcaaaggacatgaacgcggcggtggcgaagttgttattcagggtggagcagatacccgttacccgcagggtatagagattgctggagggcagtgcccgtccgtcggtgtcagccttcggctcgccggtcaggctggaggaatcgaaggtcatgcggacaggtacttccagcaggtcaatcagagcgttgccgttttcgtccaccgccagctcccaatccttggccttgttggcaagaccggctgcaacgtcgtcggtgaacagcacttccggatgcaggcgcgtcccgtcctcggccatcgtgccacgttccggcgtcagcatgaagttttccgccgtggtcatgtcgatgccgtagacgcgcaccatgttgacatagttgccggagacgatgtaggcggactgctggtagaccggcgttaccgcctccacaccgtcaatgccccggaaggcatccagcgccttgtcgttcagcagtgccttgcgcccgtaatcgccggtggcaggcgtcacatcgatctttgtcaggctgcccagtgcctcgatgctctcgcggtatgcctgttcatatccgagacccacggagatcagcaccacgatacacatgacgcccaccgccatagagagcgccgtcagcgccgtgcgggtctttcgccggaacaggttggtgcagccgtagcgaaacaggtcttttggcttcatacattcccgtccttattgcttccggcgtgggtcagcggcttctctccaatatccggggcgccgccgtctgcgtcaaagtcgtcgtcaaaatcgtccaaggcagcggtgttttcggcaccgggcccaatctcgccgcgcttatagcggatgatgacatagaccacaatgccgatcaggataagcgcaaggatcgctatcagcagccacagccaccagcggctgcctgtgccgtctttatttgcgttgacgctgttggcatctgtatccgcagagctttccgccacgctcaggggcacggagatgtcctgagaatacgtctcgccgttggcgtcctcatactggaggatcatcttgcccacaaacgcgccgatcttggaaaagcccaccgttacatcggcactggtggagccgcctgccagcaggtcgcccacataacagggggtggaggcggtcatgccgtcggtggccagcacccggatattcatagccttggcgcggcccatgttggtcagcggcacggagatggtaacttccttatccttgctgagtgtgccgtacacctccggcgtaccagccagaacatccatcttctggctgaccggcagcatgatgttctgcgccgccttaccggccactgcctcggtggtctcataggtcaggttgatgcccagcatggcggggccaacctccgcgtcctgcttggccatgatcttgtatttcaggatcgtcgtaccgcccggcttgatggaatcggcataggcggtatccgtgccgcctacgcacagcgtcaggccgggagaattggtgaataccaggctggagatgattttcttggccgtgtcatatttggagttgttgatcagggtcaggcgcagctccgtttcctcgcctgccatcaggccggatacctcggtatcgtccacatacagcttatagctctgcgccatcaccgacatggcggaggcgtcatagccatcgatcacggtaaactgcgtggagaaggagccctctgcaggggcgctgttctcgaaatagttggccttgaatttaatggacttgttgccggaggtggcaaagggcgacactgtgaaggtgtagtccagatacttcacctcgccgctggcccagtagtcgaaatatttgcctaaattggtggagtcgatcacgaaggggaactcgtccagcgcggcggacaccacgggatagaccgtcacgctggtcagggtaccgcccacattgatcacggggatccgcatggagatagtctgattgggtgtgccggtaggcacggtataggagccgcccgcattggtacccgccacctgaaggctgccgaaggaggtagtgacgccggacatattgccgttgtcggtaacggtcacataggcactgaccttgaaggtcacgtcctcggtgatagtggtgccgttcacggcatcctcccgccacacggtggcattgatcttaaagggcacagcgtagcgtcccttactggcaaactcgctgaccttgaactcgaaccacacctccgccgtggagttgtaggacatatcctttaagtgctgcacatcgctggcgtagatcagctcaaagggccagttggacacgctggcgtcggtaggcacatcggggtagatgttgatgttgcgcagcatgtatttctcgctgggcagatactccttgttcaccgccagcggcagcacgatcttcaccacctgaccgggaacgcctttgggggactgtgcgccggtatccatcaggatcagggcgttggcgtcgctgggtatgaccttgatatccgtgttgggcttttcgtctgtaaccgagaccccgctgacgccggcgtcctctccgttttcgtaagacgtgtaagcctcaatggtgctgtcatctatcacatcctctgtgacctcttccgccatagcgacggcgggcagcagggatactgtcatcaatacgcagatcaacagggccagtacccgttttaccgtttctcttttcactgtgcgttctcctctccggtgtggtgattttctatctctatctttccgtcactgaaatagacggtacgatccgtataacgctgcatctgcgggtcatgggagctgaggatgaaggtggtgttcctctcccggaagatctcacacagcagctccatgacctcctggccggtacggctgtccagattcccggtaggctcgtccgccagcacgatggagggctccgtaataatggcccgggcgatactgacgcgctgctgctgaccgcctgacagctccgcaggccggtgatctacgtgtccgcgcagtcccacgcggctcagggcctgccacgccagccagttccgttcatcctccggcacgcctcggatggccagcggcagtgccacattctccagtgccgtgtattggggcagattgttgtagctttggaacacaaagccaatatagcggcggcggaaccttgtccgctgctcctcgtccatagcctccaaatgatgcttgcctcggacaatgatctcaccctccgtgggcggctcaagacctgccagcatattcagcatggtggacttcccggagccgctgcgacctgcgacacagacaaattcgccttgcagcacggacatgtccacgccatccagcgcacgaaccgtgttgccgccgacggtgtagtgcttcttcagccccaccgtcctgatgatggtttttcgttcactcatagttctctctcgctatctcaaatgtggagggcggcagcacatagttccgctcctccgccgtcaggccgaacttgatcttgatgcgctccagcttccgtacccacgggtcgcccagcgcccacagtaccagaaacgtacacagcccgtgacagaaatcgaagaaaaagctggatagataggccgcgcctatcgtctgccaggtaagggggctgacgtagccgatgatgaaatacaggttcatgatccagccgtacagaaagccggacaggaaaccgtaaaggcacagccgcaggggcgcgtggtcggtaagctgccgcacaaaatgcagcagatcgccccggttggtattctccgggcacagcctgtcccaccattgcgccgcaaagtgacggcggcttctgcctttgaatacgccggcattttgcagaatacccgccagaaagcccaccagcccccatgtgaacatctgccacggcgtccacggcccctgtccgaaaatgaagttgctgacaaaggcggtcagcgcgccggtaagaaagcccgcctccggcccgaaggccaccgccgtgatgataatgatggcggagcagggcttgaagttgggcagcgggatgatctcaaacacggtgcggcctaccacggcaatggccgccatcaccgcgatcggcaccagctcacgggcctggggcttcttcttatcgaataccagtatgaaggggatggcggacgccagcaggaacagcaggcccagcagaatatccgagtttaatatgatgtagtcccagaaggtgcgtgaccccaccggattgaccgcgggacggtggctatggtaatagccgaaggccgccatcagggcgggcagcaccagaaggatcacccacgcggcggctctggttcttttgctgacaaagagcttcgacacgacgcgatcacctcctcgcaggtaatgtccatggggaagtgctccgccgcgatacggttggcgtcggtggtatagaaccggtttccggcaaagaagtcgtggggctcgccctcggagagcagcagcccgtcaaacatcaaggcgcagcctgtggcgtaccgggcggcaaactccacatcgtgggtcacgatcaggatggacgtgccttcccggcacagcgtcagcagcagctgcgccagctccgccttggcataggcgtccagccctttggtgggctcgtccagcagcagcaccgtggcctcccgcagcagcagcttgcccaccgccagacgctgggtctcaccgccggacaggtcgtagggatgccgcgatagcagcggcgtcagctccagcctctccgccatgtgcatggctctggatttgtcctgaccggcgctgtccagtagctccttctccaccgtgtcggccacaaacagcgaccgggcgttctggggcagcatacacagccgctgcccctttgccagcttcaccttgccacgatagggcttccgaaaaccggccagtgcctgcatcagcgtggtcttgcccgcgccgttgccgcccagcaggcacagcagctccccctgatgaagcgttacatccgtgccccgcaggatgtccttgcccttttcggtatagcggaaccaaagctccttgccctctaaaacggtggggtgctttgtttctttttcggtttttgtgtcctcaggtacggtagtatcttccgcgatgggcagcagccgctccaagcggcggcggccgtcccgtaccgtcaggggcagctcgtccacctgctccagctcactgaagatacggacggcggcgggaagtccgaaatagatacggctcttttccacgcttccggacagctgctgcgcgatctcagccggcgcaccgtctgacaggatacgcccctgatccatggtcaccacacggtcggcggcggggaatacctcgtccagccgatgctccgtcaaaaggatagctacgcccagctcgcggttgatccgctgcacggtggcaagcagattgcgggccgccagcggatccagcatggaggtgggctcgtccaaaatcaacagcttcggccccatcgccagcgccgaggccagattcatcagctgcttctggccgccggacagctccgtggtcttggcgcggaaccacggctccatgccgaaaaaagcggccatctccgccacacggcggcggatcaccggcacgctcagtgccatgttctcaagaccgaaggccagctcgtgccatacgaagtcggtgacgatctggttatccggattctgctgcacgaagccgatctccgccgcagcggtcatctccggcagttgggaaagaggcgcgtccttataaaaggtctcgccggcccttgcccccacgggcagcaggccgggcttggcatggcgcagcagcgtggtcttgccgcagccggaggggccgcacagcaccacatactcgcccttatgtatctccaacgagacgtcgtccagtgcccgcgtgtcagccagcgggtaggagaagctcaggtgttcaaaccgtaagagcgccatctgatggcctcctttgtttcaagaataccgggcaggaacatcagcacggcgtagaacgcgaacatggtatagctggcactgcccagcagcaccggcgtcatggcgggatagaactccatatacccgtgaccgaaggcgcgggcggtgatgcagacgcctgccactgccagaatgaggcccagcgtccgagcgtcccggccatcgaagcggaacaggtggaaggtggtgcgccgcttggcaccatagccccgggctttcatagagtccgccgtctccaccgccgcctccatgctcatggtcagcagcaccgacaggttccgcagggcactgcccagcctttgcagtagccgcgtgccctcctcctgcaacatggcctgagactgacggatctcgcggcgattctgctgaagctgtgggatgaaccgcagcgtcatggtgatcagcagcgacgtaccgggaaagggcttgccgaacaggtacaggaacttatccgaggtcatgacctcctgatagcaggtaaaccacataatgaccgcgcacagggagcagccggacaccagaccgtagcacaccgcctccagcgtgtaccacaggtgattgatggtaaagagcatggtcacgccccgatggttgaacagcggattggcaagggcaatcagcagaaacataggccccacaaaccgcatggtgtggccgtaggccctccagccccgcagccggatggaaaaccagctggcgcccaggaacgacagcgccaccgtgaccgggtgcatacaccccagtgtcaggcccagcaccagcacgaagtacgccatactgaccgccggatgcaggttcccgaagaaacgcatccgggtatcagtcatggttatccttccattccttgccgtagccgtagggatctccgttttccagatcgcagccaaggtcgcaggtgtaattccactcaatgacctcgccgggcttgacaaagtacacgccgcagccgtagttgggataccagtcgttgacacagtacatccagccgctccaacggccgccgtcaaactcataaaggttgttgatgccatccacatagcagccactggacgtgccgccccgataggacatgtggatcttgtacttttcacacacaaaggcgaggacgtcgaaaaccgtgtcgccctccttcacctccaccgtggttaccggcaggatcacgccggaggccgggacgatgcccgcccacttgctctccagatgcataccattattcaccgccgtatcgcagcgaatggtaatggtgacggtgtttttcttgctttcgggcttctgctcaggggtaggcgcgggggtgttgctgtcctcgcccttctggtcgtcttttttattgtcatcctttttcccgccggagttggacggcttgttggcggtatcctcctccggggtggtagaaggcgtctggtctgtcttattgcccttgttgccctgcggtgcatctccggagccctgggcatagaaatccgccacgctgtcaggcttgctgggcgcggtgggggccgtgtccttcttgccgaagctgaaggcctccgtaaaccaggaataccacggcttttcctcttcgggttggtcggtatcctctcccacatagtcaaggcctaactgtccgctattgccggcagtgccggtctgggcgcaggcgcacagactcgacagcatcataattgccagcaggaacgcgatgatatatctcagattctttttcatgtcaattctccttcagccgttagggctgttgattttgaggatgcgggaggggccggcaaacccctcccgctatggaaaagacaacggcatttgccgtctcgacttgccttttgcggatttgaggatgggggacggggcggcttaaaccccgtccccctatggaaagctgacagtctccgttcagactgtctcggcttgactggggttaattgctgcggatattgtatcaagtacggcttcagcggaggtctctgccaaggtgagagcctttgcttcagcctccgccttcttcttcgccgcccattctgccttagcagcccgctccgcacgctttttgatagcctgctcctgttttcgctgctcggattgctccagcttgcgctgccgcttctgccttcgctcctcacggaacaacggttcttgcttcaccttttccgccttatagcgagcggtgtcgcgcagcttgcgcatggaacgaggctgcggcagctttgccgccgccatcgcggctgcccagctgccaaaacgctgctcaataaacgtaccgccatccacttcgctgggggatgggctgtgacccagtgagatggcgcaccggctcagataccgcgccagctgcggcagcggcgtatctgcgtttcgctcggcaaatgcttcgtcacgcgcttccagtgctgctacagcccttttgactatttggttttgcgcccacgcctgaaaatcaatgggacgtccgccgcgttgagacatagtaacactcctccttattacgaaaaaacgccggacaagccccttctcaggggatgaccagcgacattttggcaagaaaaaacgctgacaaaatccgtcagcgcatactcctgccctcgtcacagcgagagagcgccactgtgtaccaaagatccttgaccgtgcaattctcctgccctcgcgccacaaggctttcgcctttcgtacatgatctaccttctcagaagcttcctcccaatggcggtattacccaacagctttcgccgcttcgaccatttccttgcgctcacagtgccgtccgcagagggtttctaacccaaattccttctaggctgctgcctgatcttttgcacataaaaagatctttacgaccaacacagccacacggtgtcaccggatcatatttacttgtctgatgcaaatgaatgatgctgctgcggtttgtgcatactgcaaagtgtcagcacacgctctgggtatttcgtaaatcatatacaattcacgacagaaaagttaccgcaattccatcttttactatacattgacttgccaaaaaagtcaacaaaaaatgcaggaaaattgtgaaaaagcaagaactatctgaattgcgattcaaattgctttatattgtttccatcatctggaagttcaaaagaaaggataccacggcatcttgttaattgccgtcacaaacaccgtcagaaagaagggaagattactatgccacgtcgcggagagaacatttacaaacgaaaagatggccggtgggagggtcgctatattcgcggccgaacacctgccggcaaggcggaatatgggtatgtttatgccaagagctatgccgcctgccgtgagaagcggcgaaggatggaagatgcgctgccacagaagcctatgttgacaggtgaaatgtcggtatgtcaggcagcggattttttcctgtccgagcaccgcggcgcactgaaggcctcaacgattgggcgttacgagtatatgatacggcactatatcgtccctgaactgggaacgctcttgctgcgtgatctgacggcggaaaaactttctgcgtttttttcgcggctgcaagatagaggtttgtcatgcaagagcacaagggatgttggcgtgctgctgaagacgatcttcaaggttgcaaaaaagagctgccattgcgattgccccggcagagaggcggagttgcccgcgtaccgcagcaagaagatagaggtgttttgcaatcaggaaatctcctcattggcacggaagatcttggcatcgccagacatgacagggctgtgcgtgcttctggttctgaatacagggctgcgccttggtgagatctgcgctctgcgcaaaagcgacattgactaccgctccggctttctgcgaattgagcgctcggctgcccgtgtacgcgatgcttccgggacacatctggtggtgcaatccccgaaaagcggcagttctgtgcgtcttgtagccattcccaatgatatgctggaattgctgaaagcgaccacccagagcattcagagagacaattatctgctgaccaacacggacacgccgatggaaccgcgcacactgcaataccgataccggaagctgctggaacgctgcggtatccgctatcggaattttcacgccctccgacatacctacgcgacaaggtgcatggagaatggtgtggacatcaagagcctcagtgagcttttgggccacgctgatgttcggacgacattgcagacgtatatccattcttctctggcccataaaaggcaggctgttcagagcatatgtttcttacccatggaaggggcgggcagcgttttaattccgtcaaaaaatccgtcagagatctcagcaattaccgtgccgccaagcaaaacagggacttgtttcgtgaattgtatatgatttacgaaaaacgagcttttcctcatgcagccgtaggcacagatgcctacggctttttgttggatacggaaaccaccggctctgccggtggaggcatcccgtaaaagctttagctttaagcatcgagcgaagcgagctacaagtagaagtcttgataaaagaattagccacaagtagaacataaatcgcccgtttacgggctgtagggcagaaaatgcaagtgaaataaaattcagtgccccttgaggggcttgccagtaataggcccttatagggccaaatcaaacctccggcttagccggaggttatgattttgcaggcaaggcgcgatccggcttgctgcgtcgtgaacaagggctaatcatcctgttatcaagaccgtctgggatagaaccgctcgccgacccactctgcggtcagctctttcggatgcaagaccagcgtgggcgtatggctttccacagcaaaagcaaaggctctgttttccacactgtccgttgctgacaagtccgtatcatgaacacatagtaccacatcggcaaggtcgatgatcttcctataggcttgcagctgtgcatccggcgtacccacgggacacacgaccgaaatatgggtgcatttttccagcatagtaaaatagcgttcccgcagatacggcgcccactttgtggcttgttcctcatgtggtgtatagcagaaaagcatcaggccttggtcggtggtttcccgcagaccattgacgatttcggctgcgtaaagacctacgccgcagtcgcaggcggtcagaaactgtgtcacaccgcgctggcgcagcgccataacctgctgcgccagttcgattttcattttccggcagccactatcttcttcatcaaacccccatggaaagcgcatgggtgcttgccctatgactgcacaacggtatatacggcagccttcttccaaagcagtcacaccctcacaaagattattgtcgcaataaataatgcgacaataattattaaaatgcaacgattttccaaagtataataaacgaaaaatctaaggtggtgaagttgtgacagatattcttgaaatcatcaagcagaatcgtgaggcacggggatggtcggaatatcagcttgctgaacgctctggcctgccacagtctaccatctcctcgtggtataaaaaatctatgacgccatcgtttgcatcgcttgagaagatctgcgaagctttcggtgttacattgtcgcaattctttgcgcaggacgacattcgtgtggctctgactcccgcgcagcgtgagatgttggataaatggaattgcctgacatccgcgcagcaagcagcgttggcagcactcatggatacgatgatatgcaatcatgccgcaacacgagacgatcttcttctgattgatgatagaggaagatagctgatcgaccagccggttcaatatcttcaatgcgctccaaaatcctttgagggaattaaagaagctctgacaaatgtgtatcaaacagacgtggagatttccacgtctgtttttctatccggtaacaagggaaaactacggtagatacagggcgtccgttgacaatcctgtgcggttagggtatgtctctttcgtgagcggcgaccgcactcctttacctggctcgcttttcctgataaaatttaaaataatttgaaaaatatgtaatattggctcctaaaaaggtagttaatagataagaggaaaaggaggatcgccgccatatggatgacaaacaaattatacgcctgttttttgagcgctcagagcaggccatcactgaactgtcccaaaaatacggcgacctgtgcatgaaaatcgccagaagcattctgaatgatcatcaggacgcggaagaatgtgtgaacgacgcctatcttggcgcatggaacagtattcctcctcaatcccccgacccgctgagatcctacatctgccgtatcgttcgcaaccgctctttgaagaagctccgtaccaattccgcgataaagcggggcagccaatttgaggtctcactatccgaactggaggactgtatccccgacagctccatggatgagcagctctcgataagtgaactatctgcgcagatcaacgcatttctcgctgtcttgcccaaagatgacagactcatgtttgtgaaacgctactggttctcagaatcaatatccgagctggctgacgcatttggcatcaccgagaacaacgtgtctgtccggctcagcagaatacgcgggaaactacatcaatacctgaatcgtaaggaggcaaacatataatggatcggaaaaccgacaagctggtgtcagccatcggagatattgacaccgtatacctggaagaagccctcgactttaaccgcacaaatgcaggccggagaaaacgcacccgctttcccaaattatctgccgcgtgtgcggcggtgctgatcatactgggcgtatccgtgaccgccttcgccatcagccgaataccgctgtcgtggcgcgacatcttttcctccggtcagaccgtcatcggtgacgcagacgaggcatcggtgatctcccaacagcaaccgcaggccgcagccacggaagaactgcagatcaaggtggaaaaggtgatctctgatgaacgagccctttatcttctctattccgtaaaggcaaatgagggagccgtccttgaccaaacagggaaatttgccgacttcgagctgtattttcccggtaagatgatgtccggcgcttatgtgtctcgctttttggagcggaaggcgggcgtactggagaatgaattggagggcgtcgtatacgccgactggcagccgggcgacagtgccaacggccttgtgatgagtctcaccaactggcaggagcaagaactgttcaaggatgtaaaggtagacttcaacgtggcggaaatggtggaaaataccggtgaaaacgccaacttaccgcaatgtctggatagcttcgccaacggaacatcacggtatcggtggcagccaggcgatgcggaggtaaaactaccctacggcggcgcgtccatctgcaatgccggttgggaaaacggtgtactccaactggtcatgaagggcccggcggaggagaacgaatggacagccccggagaactggtatttcatcgacacacggacgggtgctgtcatttatccggatcccagcgttcatttcagccccccttccgcgtttgaccccgatgcgaccgatgccgactggtgctatatttgggagtttgtgaccattgataaggaggcacttccttaccttgaaatgcactggggcggaaaggagatatataccactgtgttgccgggaaaatggaaggtcactctggaggaaacgcccgttaccattgcgagcgaggtgctggcagagaacgtgcccctgacctatggcggggaggaactgacggcggagcggatcgagtgctccaagctgtccgtggcagtgtatttcgccgactatgtggactctaccaccggcattctcggcgcgttcagggtatttgacgcggacggcaaacctatcccctgcgattggagcttcacagccgaccaagccgacgatagttgcatgatttggacacggtttgacgagccaatcgagcctgaatgcatctgccggttaacgttcaacggggagaccgtgtttgaaagataggcgtttcgcattcgattgcagtgattattattcctttttgccaagaattagaaagggggtgtttatgctcgacacgaatgtaggtttaatcgctgatgataagaatacacgcatctgatagaatgagaaagtagtaattatgacaatgaagatcaagcgatttttcagttctattttgacagcagttttggttctctcgatatgttctgtttcggcctttgctgttacctcggaagacacccagaattgcgttgtcaacgatgataatccgttcgccattgtgatccgcgatgccgacgggaatattgtcgaaacctattatcagacacgcacactatacgtcaacgggactcagtataatattcccgcaggcggaactttgacaacgtatcagtacgatacctcaattgcgttttttgcgggattttactttatccatcccgattataacggctacgctacaactcgaaatagaagcgtaaccgtaaccattagaaatgcttcctctgtcggcggtacaaggcattccgtatacacaggcacattcagcaccaatgaggaaagcaacacaagtagtgcatactatgaaagtggtattcaagcgggttgctcgtgcatttcaatcaataagatgtcggattcttccaggtctttttacgatgccgtgtataagaataatagcaccagttcgatgacgatttcgcttctcgtgggcagagattaaacagtggtaagatttattcaatgagcaagaacagcgtgggcggggtttgccagtcggtctgactgcatggttcgcaatgcagcctattacatattattatgaatggataagccggttctcgcggcgaagaagcgttttccacctgtacgccccggcagctttccgctacaatggccttgtttgaggtcattaggcattgaggacggagcagagcaggcgcgggatgggcgatcatgtccagcggagcatatcagcgtggccatgaccccgacaaaatcttgaaggggcgaaacgcaaataaaccgataaaaaaagatgaagggtgtatcagctggtacatccttcatctttttcgctattctttttttgctaatgtttgcgtatgcaggaacgcatccatcagcattttcccatcctcgcggtcactccaccagtacggccgcagaaacaacagagcattctccagccaagcataatcgtccttggtcaatgtatgactttgaagccctgcactgatcctgatatacgattctcttactttggaactggcatggtcacgcacaagatagccgttgagaaagccggtgatgacagatatttcctcatccgtataaaacatggcgtccctcctgaattcaatcacacaggacagattatagcatattttctttgcgcccacaagcagtcttgtacaaaccgggcttcctctatgtcaaggctgccttgaaaagtgccgacgtaccgactttatgacagttttgtgacactttccccgcacttttgcgggggaagtcagagccttcttctgatatgatacggacaaggttgatacacgacctgaatacttcaaagaaggagcgtaatataccatgaaaaagaaaacagtttggagccttttactggcattggcaatgacggtaacggccatcggagcatcgactgcggcatttgccgctgcgcccaatcaggcagagccgcagaccctcatcgctaccgaaaacgaggatgccatttgggatcagatcgaggcactggaggaaaaaagcgatgccgtattccagagaaatgaagcactgtgggacaaggtggacgaggcctgcaatgccctgcctgatgactacgatttcgaggactttgacgaggcagcgttcatccgcaacatgactacgctgacggaggcggagaaggaaacccttttgaatgacatcaaggagctgaacgagctggatgcccagatggagaagctgtatgggcagttgcccgcctgcgacaatatgccgctttacgagaaggcactggaaaaggccgatcccaaggtgctggacgagatcgacacgctggagcaggagtatgaccgcctctgcgagaagaacgccgatctgtgggacaaggtggacgaggcttacttcaacctgccggacaactacgacttcgacaactacgatgagaccaccttcatccgcagcctgagcttcctgaccgacgcggaaaaggacgcgctgatcgccgactacaaccgtctggtagagcttgataaccagctgtgcaagctgtacgataccatttggggcgataccggctgcgaaagcggcatctgccccttttgacggcaaagaggttttctgatatgatgaactaaatacgacgccgatgctgcgcctgtgcgcagcatttggcgctgctttctaggaggtcaccatgggacattccatctatttggcggacgatgaaaagagcatccgggaactgctccatagctttttggcgagtgacggatatactgtgcactcctttgaaagcggtgacgcgctgctggaggcattccgtcaggagcctgcggagctggtcatactggacattatgatgcccggcacggacggccttaccgtgtgccgggagcttcgcgctgtttccgacattcccatcatcctgcttacagccaaggacagcgagctggactacgttatgggcatcagtcagggcagcgacgattatctcaccaagcccttccgtcctactattctgctcatgaaggtgagagccctgctgcgccgggtggagatggacagggggaaaacagcggcggcagtagatgaattgcgctatggggatctccgctattccgccacggaaaatgccgtcctttgcgggaatacacctgttgcactgacccaaaccgaactgcggctggtcagctatatgctgaagcagccggagaaagcctattcccgtgaggagttacttaacgcagtatggggcttcgactcggaggtggagacccgcgtgaccgatgaaacgctgcgccgtatccgaaaaaagctgctgcaagcgggcagcactgtcagcgtaagcaccatatggggctttggctataagctgaaaggagcggagcgcacatgaaaaacatcaagctgcggatcgtgtatctgatcctcggtgcggcactgctgctctttgcccttttcatgctggcggtgaacgttgtgatccccgcccactttgtaagcgaggcggaaaaggcactgcgcaatgaggcgcagtatgagaatcgcaccattccttacacctatgagggcgaggtgtatgatgacgattgggacgacggggcggaggagcatttcttcacgcccagcattgtgtttcttgagctggagaacggctaccagcccaacacatggagccaggacacctatcggctggagaaaaagctgctggcgtattgcagtgaacggtctgttgcgcccaatcgatgccacgacttcaaggcagacaagcaccacctgatcttcatgcccgtgcaggaggactacggcaattcggaaaaaccgtattcctatatcatgtacatagatatcgggcctatcacccgctatatcgtgacgctgaactgggcgttctttggggtgctgctggcaatttcctccgttatgtgcctgctgggcttccgcttcggccgtgacatcgaaaaggaggcggagcggcagcagaccttcttccagaatgcctcccacgagctgaaaacgccgcttatggcgatacagggctatgcggagggcatacaggcgggcgtgatggacacaggcagcgcggcggaggtgattctggcggagagcgaccgcatgacggggctggtggacgagcttcttgacatctcaaaaatcgatatggggcggcagccgcttaccctttccgaaacggatattcgagaactgctctacgacagcatacgcgccgtggaaccggcagccgctgccagcggcattaccatcgcgccggacttccctgaagaacccatcatggtcaaatgcgatgacacgcagatccgcagggcggtcacgaatatcctgaccaacggattgcggtatgcccgcagcgagctgcgcctgacctgctggcccgacaaacggaatgtgataatccggatacaggacgatggggatggcattgccgagggagacctgccccacatctttgagcgcttctacatggggaaaagcggcaaatctggcatcggccttgccttgacgaaggagatcatccacctgcacaagggaaccatccgcgcttacaacggggacaccggcgctgtgtttgagatcacgctcccgatggggagataaatgcagatgtcgtccgccaagtacaagaccttaaacgccgccgcttctttcgcgaagctcatcgctctgcgacgattcgctatcggcgcagttcctctgcacggtggcaggcaacaaggcggccagcgacagggcgcagctgcggtgcttcgcggcggcagcgctctgttgcgtaagggcagcgcgtgtgaaaacggcagccgggcggtgggtcagtgggacttggcagctcccctgtcagaagcggcttttcctcaaagcgtgcggctgggtcagccttgggaatggcgttgatgagaaaacgtgtatatgggtgcagcggtgcggaataaacctctgctgtacgcccgatttcacataaccgcccgagaaacattacgcatattctgtcggagatgaagcgcacaacggacagatcatggctgatgaacagatagctcagcccgcgctcatgctggagctgacgaagaaggttgagtatctgattctgcaccgaaacatcgagtgcggagaccggctcatcgcagacaatgagtgccgggtcgagggcgatggcgcgtgcaatacctatcctctggcgttgcccgccggagaactggtgggggtagcggaagaggaactcctccgggatgccgacatcgcgcagaagcgagagcacgcgttcggtcatttcctcctttgtgtggcagagtttgtgcgttttcagcggctccgccacaatgtcacgcacggtcatgcgcggatcaagggaggcgtagggatcctgaaatatgagctgcatacggcgacggtatgggccgaagtccttctcgcggagtgaggtgatatccactccgccgaatgttatctcgccggaagttgcctttatgagccggataagcgttcgtccaagtgttgatttgccacagccggactcacccacaagggcaagcgtttcacccttgaatatctcaagtgacacgtcggaaacggcgtgtacttttttcctgtttttcagagtgaactcctttgtcagtcccttggcctcaagcagaatttcgttcataggcgcacctccggtatgttgatacagcgcacaagatgaccggaagacacctcccttagctccggcacgacatcgccgcagtgcgtaccgcacttggcgcagcgcggagaaaagctgcaccccactggcagatgcagtagattaggaacagtgccggggatgatctccagcgcaccattgccgcgtgcaagcgaggagacggcagccatgagacctgcggtataggggtgcatggggtgggcgaatagatcaaacgtatccgcctgctccacaacgcggccggcgtacatcacataaacgtagtcgcacagctgtgctatgacaccgagattgtgtgagatgatgacaatgccggagcctgtttcattgcgcagcgcacgcatgagctggagtatctgtgcctcgacggtcacgtccaatgccgtggttggctcatcggcgatgacgagcttgggccggcatatcattgccatcgcgatcatcaccctctggcgcagtccgccggacagctcatgcggataacagttataacgccgttccggttcggatatgccgaccttgtggaatatgcgcagaacctctgcctttgcctcccgcggcgagatcttacggtgcagcagcaacgtctcacgcacttgaagtccaacacgcatcacagggttaaggctcgtcataggctcctggaaaatcatgcctatctcctcgccgcgcacagtggacatctcatgctcagagagctccaacagctccttacccgcaagctttatactgccgccgacgattctgcccgggtagtgtagaagccgcatgatggagcgcgccgtcatgctcttcccgcagccagactcgccaacaatgccgattattctcccgcgcggaacggatatggacacatcattaacggctttgatctcgccattttgtgtgaagaagctggtacatagatgctcaacacacagcacggtcgcgttgtccattattcttcctccttactggtttttaagatgcgggtcgagtacgtcgcgcaggccgtcaccaagaaaattgaacgccagtacgacaaccataatggcgacgctcggcgatagactaagccagggttggctataaagaaactgccgcccggcgtttaccatcagtccccatgaggcctgcggaggttttataccgatactcagaaagcttagcgagctctctgaaagaatagcggagggaatgttgagcgtaaagagtacgataagtgaaggtgcgcaatttggaaaaatatgccggagcatgatcaccagcttccccacaccgatggagcgtgccgcctctacaaattccgtctccttgagcttaagcgtttccgcacgcacgatgcgcgcaacacttgcccagttgacgagtgctaaggcaaggaaaatattgatcatcccatcgccgagagtatacattatcgccattgcgaggaacatcgacgggaacgccagcatgacgtccgcaatgcgcatgatcacggcgtccgtctgcccaccgttgtacccggcgattataccgagtatcgccccgaccagcatagagatgacggtcggcactatgccgaccagcagtgacacccgcgaaccgtacagcatccgtgtcagaacatcccgcccggcctcgtccgtaccgagcagatgcgcacgcgacggtggggcaaggcggttgtgcaggtccatgctgtcaaaggtgtagggtgtgagtaccggcgcaagaattgcagcgaggataaatagcagtatcacaatggcggaagctgcggcaagcttgttttcccgccacaggcgttttgcggcagaggcaaaggtctccgcctcgccaagctgtgcgcacagttcgtttggaagttcgggagattttctcatgttcacacctccttacttatgcgtgggtcaagtgcggcatacaggcagtcggccacaaggttgccgagaatgacaagaagcgttgagaagagtattgtaccctgcaggagcggaatatcgcgcccttcaattgcctgcacaagcagacggcctatgccgttgacagagaacaccgtttcgcatatcacagcacctgagagaagagaggaaagctgtactgccatcattgttatcaccggcagcagtgcgtttctcagcgcatgcacgatgataacaccgatctgacggtgacccttggcccgtgcggtgtcgatataatcctcctgcatgacctccagcagagtagagcgtgtgaggcgtgcaatactgcctgcactattccaaccgagggcgatggcggggagaatgtatccggtccagctatccacgccggagatagggagccagttaagcctatacgccagaaagtattgcagcaccattgccaccatgaaaactggtacagatacaccaagcagagacatgcccatgaagagccggtcgagtatcccgttttttttcacagcggcgattataccgcaggctataccagtcacccacgcgatgagtgctgcagcaagcgcgaggtgaacggtgttgggaaacgccacaccgataagctccgtcacactgcggttgagggagtagctcgtgccgaagtcaccgcacacagcatcggatatgtaacgccaaaactgtacgtatatcggctgatccagcccgagctcgcgtgtcatgcgctcgatcgtctctaactttgcgtgctcacccatcatcgtgacaatagcgttgcccggtacgatgcgaagcattatgaagataagcagcgccacgccaagcattactatcgcggcttgaatgacgcggttgagtatgtttcttgccaataactcagcctcctgaatacacagcgcggacacccgaaatatcgggtgtcctgccgcacattgatatgtatttttaattacttgagcgttacgtcattaacgtagaagttgctgaaccctgcccagtaagggataaagctctcaacgcgatcgccaatcgcaaataggtgggtgctgcctagaagcggaacccaggcggcatcatcgacgacgatcttcttttcaagtgcctgatactctgccatgcgcttggcgtcatccgtgatgccggaggctgcggcaacacgcgccatgacctcggtgtcagagtagttcaagctgcggatgcgcgtcttggcggcactgccgaagaaggtgtacataatgttggcgggatcattatagtccatcgtccatgtggcgatgaaggagtccatctcgccggacttacgcaggtcgagccaggacgactcgtcatagctttttatcccagcattgataccgattgcctgcaggttctgctgcacgacctgatagacgagctgaagattgctggaggcggaggagtccatggaaagctcgaaacttatctcgccgtcggcgtagcctgcatcggcaagaagtgccttcgcaccttcgggatcgtaagcggaacgtgtgagatctttgttaaagccccagacgcccttaggaataatgccgttttcgaccatggcgttcccagcgtagatggaggaaacgatagtgtcggcatcaactgccatctgcagtgccttgcgcacgttgacatcagagaggtactgattgttctcgttgagtgcaaagtacgtaagtcccacccgagagctgacaacaagcttgtcggcgtactgcgctttataggtggcctcgacaatgctggaatcaagagcctcaaggtcaatgatgtccaattcgccattctgatacatgaggttctgggtggaggggtcgggaatgatggagacgatcgctttctttacggacggtacatctccccagtatttgtcgttgtattcaagggtgaaatggtcgtttacgacccattccgttaccttataggggccggtaccgacggtatcctcgcagcttaaaccaaaattggcgacgctctctacggtttccttatccacaatggacatagcaggagaggtgagctctgcaaggaaacctgcgttcgcggtgttgagcgtgatggaaaaatgtgtatcgtcgattacggcaaagccctcaagtgtgtcggcctcgccgttttgcagagcctcagcaccgacgacctcaagaggaatatcgtcgttcacaccgccggcagtcagaagccgctcaaacgtgtactggacatcgtcggcagtcaatgcattgccgttggagaagacgatcccgtctttcagcgtgaaggtgtaggtcagaccatcgtcagaaaccatatgactctcgcagaggctggaaacgatggccgtactgccgtcagattgaacctcagactcaaacaggcggtcaaatacgttcataggcaccatgtagtcgtctgtggtctgcgaaacatccatggtgctgatgtcatagagtgctgcaacacgcagcactccttgctcaacggccgtaccgttacttcccggggtgggtgtggtcgctctggtagagccacaggctgtcatcgcgagaatgcttacgcagataagcgaaacaaaaacaaatcttctcaagttgatcctccattcaaaatagatgttgtggtgtcaaaactgtcttacgaggtcattatacagggaatagtttgcaattaaaaccgttaaaagtgggtgaaaagctgcaaaaagtgctatttaccgcttcccgtcacgctgcagcgtgcggcaacagcttcagaaagcttttgcttgtcttccggaaaagaggaacacttccgcccctacaaggctctactataccaaaatccgtctggcagcggcattatgaatgtgcttgaactgaatccttatcattgctgagtcagatgatattggatttatcacaggaggatagggcggcgcattagaggagcggcttttcaatgtgtgtcttgatgcctctacattcgagatgacccgttagagatttaggaacttaacatggactttattttcgacatggtaaaatgaataagcgggagcttctgccgtccgagggcggctgcaatgcaccgcaaaacctgcggatgcagagttatttacaaggagaagatgtatgacatttgaaattcacagcgacatcacaaatcgatctatgaccatagccgcccgcgcgatgcgcaaggtgctgcggcgaaaacgcagcatcctttgggccgttttcggctggagcgtctttttcatcaacgcattgctgctgatcccattcgacggagagccttttacgctcgatgcccgtacggtgatttccctgctggtagaggtgatgctgctgtccgttctgctgtttcaggatcgattcaatggaatgatcgcctgcaaaaacacgctggcaggcacagaggactatcatgttgtgttcggcgaggattcctatactgtcgttacggcggccaccacctccaccttccgctacgagctgatcgacgcactggctgagtcgcaggactacatcatctttctgatgaaaaaacgctatgcgcagcctctggataagcgtactcttaccggcgggacggtggaggaattcgaacgatttcttgaggagaagaccggaaagacgttccggcgtgtgaaatgaacgagttttctataacgccctttcgcgggctgcatttgcttctgcttttgctgacggcagcggcagtgctgctcctattcttgctgttgcgcggcgcactgaaccaaaccagtgaggcacagatggatgcgctggtggctgagttctgcgcggagtaggcaccgattttggtttcgcccggccgcctgatgcctcaaaaaagagcatcgtcacctacttagacgacaatatggtgttgtgtgaggtcgaagtcttgaggacggatagaagcgcagtcgcagagagcatctgcggctgcgcttcttgtattccggccacggtacaaacggatggctttgaccgttgccctcggtttctaaggagacacgaagtgcgctacatggaagcacacttcatgatggaataagatttttgcagaagatgcagaaatctgtcgaaacggaggtctcagcacatgaatccatataaagaaatactccgaaaattcttctcggaatatgtcggcactttgagaaaacgcaggggactgacacaggagcagatggcggagaagcttcgtatcaccgggcgggcatatagcgatttggagcggggcatatactgcttttctgctgttgcactggtgttcctgctgctcatgctggaggaaggggagataaaggaaatcttatctcccttgcgggaggaaattgaaaaagtcgagaacagagaggtggcgtagtgatccatggagattggggatatatacgggcttttgcgccggcttggcctatctgcggaaaacacgcgcttttttcatgtttcgtatgctgtctacctgatgacccggcagccagcccggacgccgtttgctgaatggtggctgtacccggcggttgccggacactatcacacctgtattttcaacgtgaagagcagcgtctgcgttgcggtggaccgggtatgggaaacggaaagagaagccctgagatccatcacgaagtatcccttgaagcgaaagcctcttccttcagagtttattgccattcttgccgcctacatcaagagcggcgacgcagcgtgagcctttcgcaattaccgtgtgcttagggatgcaggaaataatcggcacacagggtatggttcccaccggatttcatggagcggaattggcggatattcagtttggcgacaccgtagctgtgattggtattggtccggtcggtctcatgtctgttgctgccgcagccattcgcggggcggccgatatttatgcggtgggatcgcgaaagaattgcgcccaacttgctttggaatttggcgccacagccatcatcaactatcgggagggtgacattgtagagcagatcatggagaaaacgtccggcaaaggtgtggatcgtattattgttgccggaggcgacaataatacattctctcaggccatccaaatgttgaagccaggcggggtgattggcaatgtcaattacctcggagaaggagacaccatcgggcttcctcgcattgagcttggctgcgggatgggacataaaaagatcgtcggagggctaatgcccggtggaagattacgttcggagaaactggctcgtttggttcagaccggtcgcattcatcccgaaaagctcattacgcacaagttccatggattgaaaaatgtggaacccgcacttatgctgatgaaggacaagcctgctgaccttatcaagccgttggctctgttatgatgtgagaggcataaagcagtcggccacgcagggcattttactctctgcgtggccgttttccatcgttcaaggtcttgcttgtgcgcaggctgctctttgcggttttcttcccgcaggatactgtaaacgcccttccgtatctgctccgcttcctttacctcgtctttcagcgcggaatagcggcgggagagctttttccgctcggcggtcagcttttgctcaagcatcccaatataggtgacagaaagtatttgcgtcgagtagacgtaaagccgaataagaaaacgtgttggaatcgattgaatctttcgctgaaagtactgaggccttctttctcggcacacggatgacattgggcaaacggaaaattcgaggaaaagcaggaatgtctggtgttctacattgaaatccctgcgcgcttatggtatcatattttttatagggctgtgccgtcggatttgagacaaactgcgtataggcaggttgccttttctttcatccgctggttagagtaggctaacccatgcgcagaactggaaaggtggaatggaccaatttgcatacataaaagtgtctaatcatgtgtcagaggaggtggcctggtatgcaagaagcacgatatgattttcttcatgggcaaacggagcgcaacgactttttctcccccgcaatgcagcagctttgcggtattatgaaagacaagcaggtcgctttgccaagcgatattggagaaggatattttcgctatatttcaccgtgtcccaatatcgagatgtatatctgcgatgtaatgttttacagggacacagtattgcgggagcaggtgtacaaggattctttttccgtcattttctctctttccgatgcgttggagtggaagtcttcggccagaaacaaaaaaacgttgttagaaaagggaaattgctgcgtatatggcagcgggctgtttgatgcggaaaacacctatgaggcaggacagagatatgtaggcgtcgggctgaacctgcatccctgccgatttcggtctgtgatggatggtttgcaggagaaaaaggtttgtgccgtctttgacgggacaaaacccccaccaaaacatagaatcaccgctaccatagaaaccacaatacgccagatattgcagtgtaattataatgactgtgcaaagtcattgtatcaggaaggaaagatactggaacttgttgcagcctttgcgaacgagatgatggatcagaattctgttgctgtgaaggggtcgttgagctgggcggatagcgaggcgttacttcgggtcaggcgacagatagatgagggatttctggaatccgtgaccatcgcggagctctccagacagcactttatatgtgaatctaaactccgtgagatattccgaaagcactatggaatcaccatatatcaatatatattaaaccgccgcatggagcacgcctacgaactgttgtctgcgcccgacgctcaggtgaaagacgtagcagggttggtggggtacagcaacatcagccatttcagcgacgccttccgaaaaaagtttggatgcactccgagcgaatataagcggagcttaccattctgaaacattaaagcaaaggaataggtgtattcttttatggttacttggatgaaaattacaaagattgcagcttcctttgaaaaacaggaatagtatgcagcgcgtttttgggacgagcttgtccagtggaagctatatcatttgaaatgtgagttgctcagcagcgacatacacatcgatgttagtgctgggcggagtcaaccattcgcaggacacacaagcagaaccttggccgctgaaaaagcagagcggcgggacagatagagtctgtcccgccgctcgtgttttaagggcatattggcttgatgaaccggaagttacagtgccgcctttttccattttctgatcttagttctaaaagttccgaaaggagcaacagtattaacgtgaatgaacttgtaaacttcccatacagctgcttttgtagcatcatcagcccattttctcatatgcggcttaaataattcatccgcactgagcgaatcaatcattgcgcagatagacttgacattttcgttcagttcggctttcaactcttgaagagacaaatgagcgtaggtatccgtgaaccactgatacagctcgccaagttgattccatttgaattcgtctgacggcgtctttacttgaagtccccttctttcatctttctcccatttaagaaccaatgttgtccaacccacctgataggcaaggttttctgccggggttcggtcaacctcatcaacccttttatcttttaaggcttctggtatgctgtcaaactccgaaatatacttctcaaatgttttattgatttcagctttgagttcttctttacttttgtatactcgcaaaaaaacacctccataactttcggtttgtctattgagcaacgattctgattatagcatagctttatgaattattctattactgcactgagcatcatggcgctttaggggaaagacatggcgttttcggggggatttttcctttcgccgactgtataatggtagacggttagaaaaggttaaccccacacggttaaaagactcagctgttctgttatttcgctatgcgcgcccgttggttagcttgctctaactaaagatttattactcaggaggtcatcagaatgaaaaaattcgcaatgctcatgttgtgccttgtgcttgtgtttgctcttgcagcctgtgctggaacggataccacgccgcagggatcggtttcggataccgtcacggtaacggatatgaagggcgaggttgccatcccggcaaatccacagcgcatcgttgatgtagctggcttgacagaggaacttcttattctggatatgaaggttatcgcctcggctaataccagcatgttcgatggggtgtctgtccccaaacatctgacaacgctttttgccgaaagaggtattgaggttgtcggcaattactccgggtcttcttctaccggagacctgaatctcgaaaagattgcggagttaaagcccgatctgatcattatgaatattcgccatgaggaggtttatgaacaactcgcagctattgctcccacggtcatgatcgacgatgacataagctatgttaactggcgtggaagatttcagcagctgggacagtggtttgataaagaagcagccgtagaaaaatggcttgccgactacgacgccaaagctgcggagcttgcggcgagaatcagggatatgattggggacgaaacctttgctgtattggaggccaattccgttcattttggttcctattacatctatcgcagcggcgggccgggtgagcttgtctacgatgagctgaaactcacaccatcagccggtgtaccggagaatgtctggggtgaagtggtcgatgcggaatacttttccctgatcgatgcagatcacatcttcttttttagcgacgacggcaaagctggagacacggggaaccttgccgtgtggaagaatatgaaagcggtcaaagccggcaacgtttactttggtatcaatgaggatcagtataatatggcttttacggcgatgggaaaggaactctatttggaaaaactcgcaaacgcgattctgaaccatggggacgttgagtaaggaaacaggcgcggttgcaggaatatcgcagagacaagagagatacaaacgctccgcgccggcttttctgattattcttgccgcattggtgctgatgcttgggttctcaatggttctctccgtctgctccggcattgccggcggtggcttcaaggtctttgcggaaacggttatgtcccccgctaaggcttccggcgttggaatgattatgttggaaatgcgtatgcccagggcgctggctgccgggctgacaggaatggccttcgctctctccggcgctgtgatgcagggaattaccagaaaccccctgtcagacgccggtcttctggggatcaatgcgggagccagtttttttgttgtactgtccgcaattctgtttcccgccgcaccagacatcgtgaaaacatgcgccgcctttgccggagccgctcttgcggtattcatggtctacggtttcggcgctggcaaacataggtccgaatctttccggttcattctggcaggtgctgctgtatcagctctgcttaccgcgttgagtcaggcggtttctctggcgtttggaatcgtgaaatccctttctttctggagtgcgggcagtttgtccggtgtgacatggcaaagcttgaaaatgctatccccggtgattctctcagccggtgcgcttggtttgcttttatcgagccggctatcagctctggcactgggagaagatagcgccgccagcttgggtgtaaatgtccgcacagtcaggcttttcggtatgcttgtggtgttgctgcttgcgggagccagtgtatcgctcgtgggaggcatcgcatttatcggtcttatcgtaccgcatatatcccgacttcttgtgggcggtgattaccgcaggctggttcccgtgtctgcgctcatgggcggcgttgtgctggtgctgtcggatattgcggcacgcatgataaacgccccttttgatacgcctgtcggcgcactggtatccatcctcggcgtgcccgtcttttttgcgcttactttcaggaaggagggcatggtcttatgaaaaagaaaaccaggcagctccttatcctcaacggtcttcttatcctgattgtagctacggctatcttatccgttaacagtggttacgcaagaattcccttctcgactgcggttcacagcatattccaaccgcatatggagggaacctccgtagtcgtagcgcagtttcgcgttccgaggatcgtcctcgccgttctatgtgggatgggtctggcacttgccggatgcgttatgcagactgtcacggggaatccgctggccgatccggggatattgggcataaacgcaggtgcgggatttgccgttatgctgttcctgacatttttccctgcgctgcatatacgtaccatggcataccagccgatatttgccatagcgggcgggctttgcacaacgggactgctgtatctttttgcaaagaggaacggaaaactcctcccaatatattttctgttgggcggcatcggtcttgcgtccctattttcttcttttatgctgatcatggccgcgaacatggacaacagcagctatcagctcgtggcaagatggctggcaggaaatatttggggaacgagctggcatcaggttcttgccctgttgccctatatgctcatactggttccttttcttcttacaaagacgaacatactggatattctgctcttaggagagaatactgccatttctctgggggcagccgtagagagggagttgagactgctcctgattgcatcggtggctcttacctctgcctgcgttgccgtcagtggagggatcggttttgtgggactggtagcgccgcatatggcacgaaggttaatcggaggcagacaccacgcccttatgcctgcctccatgctgctgggggcgctgctgttgcttttggcagacacgttgggacggtctgcctttcagccgagggagatcccggttggtatcgtgatctccgtgctttcggctccgtattttctgttcctgctccgcaggtatttttaagggaggatgtctatgctttcacatatgcaggcaaagggtttgtctgccggatataacggggaggccgtcttcagggggcttgacttaaaaatccctgaaggcagcataaccaccttgataggctccaacggctctgggaaatccaccatactgaagacactgtgccggatcatttccccggattccggcgcagtataccttgatggcgaagcgatccacagaatgccgacaaagcgtgttgcccagaggcttgcgctgctgccgcagggagcgcaagcccctgccggcatcacagtcggcgatctggtggaatacgggcgttttccttacaggtcggcgctaagcggtctcggcgaaaaggatcgggagatcatccagtgggctcttgccagtacaggcatgggtccccttgaacacagagaaatggagaggctttcgggaggtcaacaacagcgggcatggatcgccatggcgttggcgcagaaaaccggattgctgtttctggatgaacccacgacctatttggacatctcgcaccaactggatatattgtaccttctgcgccgcctcaaccgggaaaatggtgttaccatcgtaatggttcttcatgatttaaatcatgccatcatgttttccgactatttggtggcgatcaaagacgggatgctgcacagcgccggtacgccgcaagaggttattacccggcaggcgttacgggaaatctttgatgtagaagcggaggtcattacacatccggtattaaacgttccggtatgcctccccttcaggataacggagcagaacaaaaaaacaggaggttcgaacacatgaaaaaaggtgtgcaatcagtgctgttctccgtgctggtgggtgcgctgctgctgtgcgccggatgcggcaaatcgggagacatctacacggcgggcgtttatacggcttccgctgaaggttattccggtccgattaccgtagaggtagagtttgacgggagcagcatattgtctgtacatgtcctatctcacagcgaaacagtaaagatctcagaccgcgcaatagatgagatcccttcccaaatcgtggaggcgcagacctgggatgtggatgccgtttcatctgcaacatttaccagcgatgccattcgtgaagcggtcagagattgcctcgcgcaggcggcactccgatgaaccatttgcgttgcaaagggtattttgcggtgatagaatgggtgagatgaagggcaagtcaaaaaatcagccattgctgctattttaagtgcttttccagcgaagtgccgcaggcatttcgctggagattccatatatggctgtatgaactcccttccatgcacaaaagaatatcgcgaatcctccaggcaagggtatatgtgtttcgtataaaatgtgtcactcccattgacaaaccaaatctacgcggttataatataccagcggtatgtactgctggtatatcaggaggcgtaggagatggaacgaacggaaacccagaggaggatcctcgaagttgggaaaaaagaatttctggaaaaaggttttaaggacgcatctctgaataaaatcgtcgcggaggcaggcttcacgaagggtgccttctacggctactacccggataagaccgctctgtttgaagaccttgtgggcgagaccgcaagcgagctgcttacccgcttcaaggcggcacaggacacttatttcgatctcgtgccagagggaaaaacaaaagacagccttgcactttccacccagcacctgcatgagtttgttgcgttcatgtacgatcatttcgacgaattcaagttgatcctctgccgatcggagggaacgggctacgcggatttcatcgaggtgctggtggagctggaggtcgatcgatccgaagaatactacgccctcctcagaaaaaacggtatgctctccgggagcatgacccgtcagcttcatcacatgatcacaagggcctactttacggcggtgtgcgaaaccatcgtccacgatatgccgagagaggaagccatgaaatacgtcgatgaactggctatctttttccactccggctggagcggacttttaaggctcgaatgagccttaaaaaataactgtcggttagtcatctctaaccagcgcggcgcatcctccaacaaacctatatattttaagaaaggaacacggaatatgagcaaacagaaaaaagaaaagcagccgccggtgctgggcaggctgctggcatatgccggagggcataagtggctgtccgtcttgggctgcgggctgtccggcgtttcggcggcggccggcattttcccgttcgtctttgtctggtacgcggccagaggcattttaacgccgggaggcggtgttccggcagggcttgcccgctacggctggtacgcgctggcggcggcgcttctgagcgcggcgatctatttcgccggcctcatgtgtacgcaccttgcggccttccgggtggcgacgaatatgcgaaaggcggcggtcgcccatctcattgacctgccgctggggtactttaacgccaaccttacggggcggctgcgcaagcagatcgacgacaacgcggcgctgaccgaaaccctccttgcccacaccatccccgacgcggtgggtgggatcgtaacgccgatactggcggtgggactgctcttcgtctttgactggcgcatggggcttgcctgcctgatccccatgatcatcgggcttatctgcctgatgagcatgatgaccgggacgggcatgaagttctttgaggaataccagcgggcaggagagcgcatttccgccgaggccacagagtatgtccggggtatcccggtggtgaaggtattccagcagacagtttactccttcaagagctttcatgccgccatcctcagctaccgcgaccttgccagcggctacgccatgatgtgccgtatgccctacaccctgtttacggtggttctgaacagcatgttcctgcttctcatacccttggggatggttctcgtaggcgcggcagacggctgggcggtgctggccgacctggtgttttacattttcttcgcgccccagcttgcctttatgatggagcggctgatgtacgcggtcaacgcacagatggaggccgccgaggcagtgaacaagctggaggcgatattgaaggagtcgccccttcccgagcctgcggcggacagcggaagcaagcccgcggacagcagcatttcctttgaaaatgtcaccttttcctatgacggcgcggacaggcccgcgctgacgaatgtgagcttccatctgccgcagggggcggcgtgggcgctggtgggtccctccggcggcggcaagaccaccatcgcccggctgatcccgcgctttttcgatgtgcaggcaggggcggtgctcctgggcggacgggatgtgcgaagcatccccacggcggagctgatggagcagatatccttcgtctttcaggaggtgcgcctgtttaagaagagcatccgagacaatatccgcgccgctcggccggacgccaccgaggcggagatattacacgcggcgcagcttgcccagtgcggcgacattctggaaaagacgccgggcgggctggacgccgtgatcggcgccaagggtgtgtacctctccggcggtgagatgcagcgcatcgcgctggcccgggcgatcttaaaggacgcgcccattgtggtgctggatgaggccagctcctttgcagacccggagaacgaggcgaagatacaaaaggccttcgaggcgctgatgaagggcaagaccgtgctgatgatcgcccaccgcctgtccacggtgcggaacatggaccgcatcctcgtcatccgggacggcgggatcgccgaggaaggaaagcacgatgagcttctcgaaaagggcggcgtatatgccgccatgtgggaggaataccaaaaggccgcgcagtggaaggtgggaggtgccgcatgatcgaacgcatccgcaaaaaatacgccatgacggagaagggcgcaaaagactatgtggccgccgtgttctggtccgtactggtcaacatcagcaaaatgctgcccgtaggcgtgctggccacggcactctccggcatcgtagaggcgctgacaaacggcaccgacccaagggcggggcttacgcgctttctggccgcgggcgtccttgccctcgccgcgctctttgtgaccttcctgatccaatacaaagccttatacgaagccacctaccgggagagtgccaaccgccgcatccggctggcggaggtactgcgccagctcccgctgtccttcttcggaaaccgggacctgaccgacctgacaaccaccatcatgggggatacggagacgctggaaaaggccttctcccacttttaccccgccatgcacggcgcgctcatctccacggcgctgatttccgcaggcatgctgctttacgactggcggatggcactggctcttttgtgggtggtgcctgcgtcgctgctgatggtctatctctcccggcgcatggaaaagcggcatataaagaaggggcttgtcacccgtcgcgcggccactgacgccatgcaggaggtgctggagtgcgcgccggagatcaaggcgtgtaaccaaaaggcgcggtatatcgccgacctgaaccgcaggctggatgaggcggagcaggacaccatccggggcgagctgttcacaggctccgtagtcacggcggcgcagtccttcctgaagctgggcatcgccaccaccgtcctcacgggggtgctgctcatgagccgcggcgacctggcgctgatcccgtttctgatgttccttatcgccgccactcgggtatatgaccccatcggctccatgtttgccaacatggccgcggttttcgcctgcgaggtgcgcatcgagcgtatgcaggagatcgagaacgaaaagcgcatgaccggcctgaccgaatatgatcccgatggctacgacatccgctttgagcatgtgacctttgcctaccgggaaaaagaggatgtgctaagggacgtctcctttacggcgaagcaagggcaggtgacggcgctggtgggaccctccggcggcggaaagtccacggcggccaagctggcagcccgcttctgggacccgacggagggaacggtgcaactgggcggcgtggacgtgtccacggtggacggcgaggcgctgctgaaaaactacgccatcgtatttcaggatgtggtactgtttgcggataccgtgatggaaaacatccgcctcggcaagcgggacgccaccgacgaggaggtgctggcggcggcgaaggcggcgcagtgcgacgccttcgtatccaggctgccggagggctaccataccctgatcggggaaaacggctcccgactctccggcggtgagcggcagcgcatctccattgcccgcgccatcttgaaggacgcgccggtgattttgctggacgaggccacggcctcactggacgtggaaaatgaaacggcggtgcaggcggcattgtccggattgatcaaggataagacggtgctcatcatcgcgcaccgcatgcgtaccgtcatgaacgccgatcagatcgtcctgctctccggcggccgcgtggttgagatgggttctccggcggagctgctgaaaaagaacggcctgttccgccacatggcgcagctccagagcgagagcatggagtggacggcgtagaacgctgcgagataaacagaattccgagtacaatattggaaaacgaagtatcgaaaacaaggaggcgtttatgaaagaaacgaataaatggtctgtcagggatgtgatcaccacagtgctgctttcggcggtactgatcgtgatccagctcgtcgtcaatatggtctgcatggccaacgactttgtcagcatggtgctgtcggtggggatcaccatgttcctctgcgcgccggtctatatgctcatggtcagccggatcggcaagcgttttgtgacgctgatctatatgacgatcctcggtgtgattttcctgctgatgggcaactggttcttgcttccttattacgttctcgtgggaatcctctgcgaggcgattctctggaaggaaggctcctgccaaaaaccgaaacggctgactgccacctggacggcggcgagcctgctgtacaacggggtcaatctgctgcccatctggttcttctgggacacctactacgattttgcgctggcaagcggcatggagcagagctacatcgattcctatgtgcgttactacacctctcccggctggctggcctttattctgctgttcacgacgctgatgggctttttaggctgcatggtgggcagtcggctgatccgcaggcattttaagaaggccggcgttctatgagagcggacgcatcctttgcggtgccggtcaagctgtgggcgctgctgtgcgtctttgccggagtaaccatcggcgggaatgtgctgctcacctgcatcctgaccggcggcgcacttctttatctcgttatgcagcggagcttccgccttgccgcgtcctatggctgcttttatctgttgctggcgctgctgctctacggcatccgcttccacgggctgcacatgccggtcttttcggaattttatgttctgatgttctggaatctgtcaccgatctttctggtgtcatgggatctgatcaccacgccgccggggatgctctccgcgttcttatcccgcctccgtatgcccaccccgttcattcttgggcttcttgtggtctttcgcttcttccccaccatgcggacggagctgaaaggcgtaggcatgtccatgaaaaaccgagggctgaccgcagcgggacagctgctcgcacatcccgtgcagagcatggagtatgtgctggttccgtttcttcttcgggtattgcagctcgccgatcagctttccgtttccgctgttgcaaggggcgcggagcgtccgggcgtgcgcggcagctattatgagcaaaaggccggggcgcgggatcacatcgcggcagccgcatgtgcgatagttacggcttcctatttggttttggaaaggagcatggcatgatcgagcttatacgcgcttcttttcaatacgaaaactcagacagaggcgtacaggacatttccctttcggtaaaaagcggcgaatgcgtcgtgctgacggggctttccggctgcggcaagaccaccgtgacaaggcttgccaacgggcttgcgccgtcctattaccccggagacttcagcggaagcgtgaggatagacggcaaggacatatcaaggctttccacatgggagatcgggcgtttggtgggaagcgtttttcaggatcccaaaagccagttcttttcctccgagcttgccggagaggtggcctttccctgcgagaattacggcctgtccacccgggagatacgggagaggacggacgccgccatagaggcattgaagctgtctcatttgaaagacagggcagttgacgtcctctcaagcggagaaaagcagcgggcggccattgcgtccgtatatgccatgaagccaaaggtctttgtgtgcgacgagccgacggccaatctcgatgccgccgggacgaggcagcttgcgcagaccctccggcagctcaaggagcagggttttaccctgctcatcgcggagcatcggatcgactggctgatggggatcgcagaccggtttttatatctgcgagacggcagaatagcggccgagtatacaccggaggatttgctccttctgccggaagcggacatcttaggtatgggtctgcgctctccgcgcgagggaaagagtcttcccgctccctccgtattggacgaaagccctgccgccttgaggacagcagggctctcgaaaagaatacgcaaagaagtcattttcgatgatgtctccctatcctttccggagggcaaagtgaccgccataacgggacaaaacggcgcggggaaaaccacccttgcgcagatcctctgcgggctggcaaggcagacaaggggacatatcctgatagacgggaaaaaagcaagagcggccgtccggcgcagggagatctattactgcggcaacgacacgtcaacgcagttcttcacggcaagcgtggcggaggagctgctgctgaataccgaattgacggaagaaaacaaagaccgtgccagacatttgctgaaggagtttgggctttacgagtacagggacgcgcatccgtccgctctgtccggcgggcagaagcagcgccttgccatcgcctgcgccatcttttccggccgcaggatactgattctcgatgagcccaccagcggccttgacgggcagaatatgcgcctgatcgcagaaaggctgaaaagcgaagcgcggaacagcagagccattctcgtgatcacccacgacagggagctgatcgagagctgctgcgataccgttgtggaggtcggtacaaagcccagcgaggtacagtgaacaccttttgccattgagccatcgcgggtcaaatgcacgaatgttactttgcgttgcttgccacgacggtgttgttactgctatactgtgtgtgcaatctttgagggaaggagggatttccatgtttcaagaaaaccttcgactgaaacgcagggagcgaggtctttcacaggaggaattggcatcacgtctccatgtcgtccggcagaccatttcaaaatgggagaaaggtcagtcggttcccgatgctgagcagttgataaagctggctgtcattcttgaaacgactgtaagcgagcttttgggcacccaggcggaaggcaaagaggaaccgaaccagttggcgaaggagctgtcccgcatcaatacacagcttgccatcagaaaccatcggacgcggcgcgtgctgaaaatcatcgctgttgctctgctcgtgtttgtggctttggtttttgcaattatggcgttgaattatgcgccaatgccgcaactaaaataacgcattttcaaaaggagtgcagctatgggcaagaaaaagagaatggtgttgttggtgttaggtataatcattcttggcatagctatataccaatatccattacaaaaagcatttgcacaaaaagccttcgaaacttatatagataaacaaggaatagatcctgacaatatcgccattaaaaagccggttaaagactggaagcaaggaggatatttgatagttgtcacttttaatgatgatataaacaacaagtattattatcattatgaggtatggacgcacaaaaaaggtgaaccattgcgttttaatagaatgacattgactattattgacgagaaaaactctgttgtattagaatatccttatgatggtaagtgtaagtaccctcctattaaggagtgatacacaaggagtaaatcatgaaaaagctcatgaaacggagtcttattgcaaggctgcttgccactgccgctgcgaccggcctaattgcgctatattttctaaatgtcataagcacaggtgcttttgttccgttgatagtaatcgtttctctcctcttctggagctttggcgtgaagagaaagtcataaacctccaaacggttttgttgttacaggttgtcgatatgaaaatgaaaaaactgatatgcgttatggctctcgtgtgtaccggaattcttctggtgtcgtgtgggtcaaatcgccttggtgatcccaaggcgcagcttatgcgggactttggcttgcatattgataagaaagactatgtgcttgaggaactcttcaataactacgaagggtttccttatgagggaatcgcactatataagctgaccgttggggaggacgttcgtcaggcgttcctgcaatgggaacgctttcccctccccgaagcggctgagaactttttagagagcctttccgcctatgtggagctgcccttgatcgcggacggctactggaaaatggtagatcgaaacccgggaacgagcgcatacacaaatgtttccctgtgcgtatatgatagggcgacgggtgccgcatacctcttgacaatggatatctaacgataagcggcaacgacacgtaaacgcagtttttacggcaagcgtggcggatgagctgctgtgatactgtgtgtggaatctttaaggtggaaacagatgaaagataaaatcggctaaactcagataccgtcgttatgcttcgaaccgacccgtatgagatccggccgatgcaaaatccatatgatgcggcggttgggtgagccaaggaaacaggatcgggagtgattacgaagaaaatgcgccgtgccacattgcagtagcggtacggcgcattttttagttatcgggtcacatgactgtcatccgagtccgtagatcagcagtgaaataccacaggcgagcagactgactgccgagccaatcaggagctgcggcggggtgtggcgcgacagcttcagagaggaacggtagaccgctgcgatcagcagcacggacggtataataaaaagcggatgaagcttccaggtcagcagaaacgcaggagccgttgtgctgcaggcatggccgcttgcgtgcagcttgaaaacggtgttgagaatcagcagtgctgctatggaaatgacataggagaggaagagaatgtggacaagccaggagcacggggtcagcattgaccagagaaacccgcatatgtatccgatggcactgcataccagtgccgtgctgcgctgtccctttctccgatcctttccaatgtggaatatctcccgtataggatatgcagccatgggaatgagcagcaaaaacaactcgcacaggagcagctcccgcagtgtcaaaagatttgccgggacatacatcaggagcactgttatgccaatgacgatgggtggcagggtcagaatgcgcacgataagatgaaagattccggcgcctcttcccttttcattggttgcgcctgctttcatgactcaaagcccagcatgatcccgccgcgctcggcgtaatagctgcacagtccccgcagcggatagcttcgcacatccgcctctggaaaccgctgctggatctcggtacaaagctccagcgcaagcgccgcattctgacaatgcccgatccggatcttcccgcccctgtagccaagatgctccatttcgtccagcataaactgccgtgttttccgggctccacggcatttcccaagcatctcaagcgtaccctcggcactggcctgcccgatggcgcggattccgaggacgcttgccatcgttgcggcgagcttgctgacacggccgttctgtgcaaggttgtgcatggattccaatgcaaaaagcaggtgcgtatgcgcctgatatgtattcaaggcttcgcaggctttatcaaagtccacatgagaatgcagctcatataaagccctttcaatgagaagggcgatttcaggtccggcggaaagggagtccacaacatagatgcgccgggccgggttgcgttcctcacaattcttctttgccacgcaggcagcattatagctgcctgaaagagcgctggtaatggtaaagacaatcacattgccgctctcaccgaatgcgctttcccagtctgcgatgttcggacacgcactgtaggaacgccctttggtgtcgcggagcgtgctgaccatcgcgtcaacatcaagattggcgtcatcgtaaaactcctcagtgtcagtgcgtattgagagcggaacactgacgaagtctgctccatccagtgtgagaaggtcgcagctggagtctgcgacgatacgaaactgattcattgtgtgtcctccaaataacaagaaacatttcaaccgactttgaaagccgacaccgaaattctatcaggtttttatcattccgtcaacggtttttagaaaaccgataaaaagattttgtaaaaccattgaaagattgatgagagccgtgtataatggccgcatggaaaagggagtgaataatatgatagaggctattgagggctttcgcttaccgcggtatgcacagattccggatgtcgggctttatttggagcaggtggtacgctatgtcaacacacaccttgcgccgttgggggaaccggagctgacaagctccatggtgagcaattacgtgaagcaggggctgatctcctcccctataaaaaagtcatacacagcggagcaccttgcgcggctcctgtttatcgccgtagtcaagcccgttgtcccgttggaagggcttcgaatgatgttcagcatacagggggacaactataccctcccgaccgcatataactatttttgtgacgagtttgagaatatgctcggcgcagcgttcggcttagctcccgcaagagagggcctcggcgagacacaatccgacgcaaaggatcttctccgcaacacgatcgtggccaccgtcaacaaggtctatctggatcggtatctagaagaatatcaaaagcagagggaagaagcctccgatgaacggcaagcatgatcgagaatgtttcgctatctcgttccaccaaaggagctacactcccttgcaacgtttgcgtatctatcccttgtggacttgccgcttacaagcagcataaaatgctattcgttgccagcaagtttgaaagcaaaaaacaggaaattgcaacagttagactaacttggatttgtcttgcagtagctgtcaatttgttttcataattccggtatgatgggagatgcagaagaaccaataatggaggtctcatgacaaaaaagaagaaagagaaaacggcacagaacaagggacaatggattacttacgtggtttacatgctgcttggtgctgcctgcggcatattcgatctgatgtatatggatacggcgggccagtctgaaaaagggcttttttcggagattataccccttgcactgatgcttatcggcacatacgccgccatactgattcagctcattatccatgaggcagggcatttgatctttggcctgatgaccggctaccgcttcagctcctttcggatcgcaaatctgatgtgggtaaagctcgacggccgcatacaatgcaggaagctgcatatcgccggaaccggcggccaatgcttgatgataccacccgacttgaaggacgggaaaatgccggtaatgctgtataacttcggcggtgcgatcataaacctggccacagccgtgctttgtgtgggactgtctttcctctgctccgcccgttcgctgggctggacgatcctgatgacctttgcggttatcgggctggccttcgccctgataaacggtctgcccatcaaaatggggccggtaaacaatgatggaaggaacgcactggagctttcccgcagtgaagaggcaacctgggcgttctggatccagatgaaggtaaatgaacaaatcgcaaagggacttcgcttaaaggatatgcccgatgagtggttcaaagtcccctctgacgagttgatgaaaaacgggatcgtagccacgaccggcgtgctggcatgcaaccgtttgatggatcagcagcggtttgatgaagcagacacgctgatgaaacggcttctcgcccagcaaaatgggatcattggcttatatcgcaatctgatggtatgcgatcagatgtatgtggaaatgatctcggaaaaccgaaaggaaatcctggacgaaatgcggacaagggatcagctgagggtcatgaaggccatgaaaaaatacccgtcggtgctgcgcacggaatatgtgtatgcactgctggtcgaacaaaacccgaagaaggctgagaagctcatggcgcagtttcgtcaatgcgcaaaatcctatccctatcccagcgagatcgagggtgagcggcagctgatggtgcttgcagctgcgaaaatgacagcacagcaggaatatatccgcggaacgaaagcaggaaactaatcgagccgcttcctacgtatcaacccccaaaagcgccttcagagcaaaaggatttcattacgaacagcagctgaccctccgtatgtactgaagcatacggagggtcagctggcttgtgtggcctgctcagtcgagcgggggctttcttttctgctgcgtcaacgtattcgtttgcggcttatccctcaaacaaactcaggaggtatccgtagccctcggcctccattttcgcgtaaggcacgaagcgcagggcggcactgttgatgcagtagcgcacgccgttgggcgactccggatcgccggtgaatacatgacccagatgggagtcaccggcgcggctgcgcacctccgtacggcgcatgccgtggctcaaatcctcccgttccaccacagcaggactctcgatgggctttgtaaaggcaggccagccgcagccgctttcaaacttatccgtagaggagaacagcggctcgccggtgacgatgtccacatagatgcccttttcaaaattgtcccagagctctccggtaaaggcgcgctccgtgccgctctcctgtgtgacgcggtactgctccgccgtcagcgtgtcccggatggtctccgccgcaggcttccggtagtcgcccggatcgatgcgcagcctggagaacagctccatctccgcccgggggatgtggcagtagccgttggggttcttttctaagtagttttggtgatattcctcggcgggatagtaattcctcagcgggccgagttccacaaagaatttctcgctgcggccccgctcgatgtccgcgatgcgctccaccgtttccctggccttgtcgttggtgtagtacacgccggtctgatactggctgccccggtcgttgccctgccggttttgtaccgtggggtcgatcacatagaagtaagccagcagcagcgcgtcgagactcacctgctcggggtcgtattccacccgaacggtctcccgaaagccggtgtcgcccttgcagacggtctggtaggtggcgtccgcctcgcaggtgccgttggcatagccgctctgggcgtcgatgacgccggggatggattgcatgagctgctccatgccccagaagcagccgcctgccagatagatgacattttccgtggtgtccatatacataccctcctcgccggacatatccgaggactgtccggccatgtccgttccctgcgtgtccttttcccgcggtatacgctgccgttctgcggcgcagccgctgagcagcagtaccgcgatgaaaagaaggaccaatgcgcttcgatacatggcgtttcctcctttcggggggagcaagggtcactccgccccatcgccgtcctgccctttgctgcggccgggtcgcaggacggtgtacagcagcgacccaaggacgcagccgaagccggtggagagccacgggctggacgtaatggcgcaggtgccggtggcacagcccacatagcggtaatacagccatcctccggcactacccaccaggggcagggcaatgacgcgcagaatgctcgtcagcttacagttctttttcttcataatagcctccctttgaagatattggatcagcccatatcggcagccagtgccttgtcgatctgggcttgcagtgcatcggcctgcgccttgctggtgatagcccccacaatgggatcgcccacgatgcggccgctgcggttgaccacgtaggtggtgggataggcgtagatgctctccacgaacttgcccgcctcgctgccggaatcgaagtacacgttctgataggtggcgccgctctgggtcagcacatccttggcgtcagagatggccgtctcgtcgccgtccagcgtaaaggcgttgatgccgatcagcgcaccgcccttgccggaaagctccttgttcagcgcgtccagatcgcccaactcgcccacacagggaccgcaggtggtgaaccagaaattcaccacggtgacggccttgccggagaacagatcactgctctttaccgtattcccgtccagatccttgccctcaaaggcagggaacttcggcaggctgctgtcatccgtcttgctgcccgtgctgccactatcagtcttgttgcccgtaccgccattgtcgggggtgtcgccagtgctgccgctatcggtcttattgcctgtgttgccgccgtcggttttattgtccttattgccgctgtcgggcatcgtgtccatatccttgtccgccggcatattcatatcgctgtccagagatttttgcatgatctcgggatacttttcctccagtgcggccagcttgtttccgatgtcgcgaatcttctccgcttcgccctgaagcagcttcagctcgtctgatgaaaactgatccttggcggcgtcgatggtttccagcagaaagtcgccgtagtttttaccgtcctccatcatgatcttacccttgtccgctgccataaagaccttttcccaaagtgctgtgttctccgccagaatagcagcctcctgcgctgtcagctccttgtgcatagcagccgcctcctcggcgttcttcggctcgttgtccatgccgtccatgtgatcgccgccctttgcgccgcaggcggccagagagagcaccagcacgactgccagcagcaatgtcattagtttcttcgtgtgcatgttcgttcctccttgatctttgtcgtcgttcttctgcggcgtttctgccgcaaggactgtttatttttactgtctccacggccgcagcggaagagggcggcattggtgggacagacacgctgcattctattaccataataaagcgaatgggctaaaatctttgttaagaacggggatttaatggaaatatatcttatattctctgaaaataaagcgattggaaaaaggcaggggctgcaagaagagagtacccgcgaaaaagaaccaagcccaaaagctgcgcggctgcggagagcgttctccccgcagccgcgcagctgtttgtaaagttctctgcttttaatgcaagacctgcatctccgggttcttctctccgaatttctcgcgcagcgcgctgcagatgtcctcccgggacttgccctgcttctcaccgtttttaatgagcttgtatgcctgaaacagtgccgaggggccgatctcgctgctgaaaaagccaatgccctgattccatgccagcagctcgaacacgtcgtccagcgcggcactctccacgccgtggacatatgcctttaccagctcccgcaccgcctgccgcatccggcccgcacccacagcgttggtcagggacagcagcagccgcgtttcgtagggcagtacgcgcttctcgctctgccatgtggtctcccaaaaatccacggcgatctgccccagcttttcgtcgatcacgggatagttcaaaagagccagtggcttgaagggagcggagctgtcgccttccttcttctccacacggcagaaccagacatggaactccgcctcaccccgctgctcggtgtagtgctcgtagcccaagccctccatgacagcgtacagtggatgcggctcaaaggtctggatgatgtgtaacccttcgcccacctccaacgtctcggctcgtttcttcagcccttcaaaaaagctgccctgtatatggcgcacatccatggtctgaaacccctgcgctttgtccttccagttttcgtaactcatgcggttattctcctttcctcactcgataaaaccagacgtggtattcgctgccgctcaccttctccgtgtgacgctcaaagcccataagggccagcaccgggtacagggggacaggctcgaaggtctggatgatatgcagtccttcgccatttttcagcgcggcagcctttgccttcaatgcggggaagaagtccagctttttgccccgcacgtccagcacttcgaatgtgccgactttgtccttccagttatcatagctcatcgtctttactccttttgtagaaagctcacgcctcctcaaagctgtccttacccacgccgcacagggggcattcaaaatcctccggtacctcgctccatggcgttcccggcgcgataccgccctcgggataccctgcgctctcgtcgtactcccaaccgcaaacggtgcaaacgtatttcataatacttctcctttcgtgttctcctgtgttttactcctccttcagccggccgtccaccgtcacggtgaccacctgccacgggatgaacttcccgctctgctggagtgcctttttcgccgccagctccagcccgccgcagcagggcacctccatgcggacgacggtgacgctcttaatgtcgttctcccggatgatctccgtcagcttttcggcatagtccacgctgtccagcttgggacagcccaccagcgtgatgtgtcctttgatgaaccgctcgtggaaggcggcgtaggcgtaggcggtgcagtcggcggcgatgagaagccgcgccccgtcgaaatagggcgcattcaccggcaccagcttgatctgcaccggccactgggacaggcggctcgcctgctgggcttgcggcgtttccacggcgggcgcgtcctgacgctgaatattccgggactggctgccggggcagccgcagggcagcgtcatgcccgctttccgcattttacgctgcttgttttccatgacggcctgctcgtcgtatgccgccgcctcgcgctccacaaaggtgatcgccccggtgggacaggtgggcaggcagtcccccaacccgtcacagtagtcgtcccgcatgagctgcgccttgccgtccaccatggcgatggcgccctcgtgacacgcctcggcgcaggcaccgcagccgttgcacttatccctgtcgatctcaatgattctccgtaccatatttttgtcctccttgcggttcttcttgactttgtggcttcattttactatcataatttatgaaagtctgttggcacgccaacgaaaaggagaaaaatatgcggatcaatttgggaaacaccccgctatttcgcggcatgacggtgccggacatcgaggaaatgctgcgctgcctgcgcgccgtagagcgcacctataaaaagggcgcggtcattctgccggaggggacacccacggagcagctgggcgtggtgctgtccggccgggtcatcatcgagatgggggacgtgtggggcaacaacagcgtcctcagcagcgtgggcgcaggcggcatctttgcggaggcgtatgcctgcgtgccgggtgagccgctgatggtcaacgtcaccgccgccgaggacacggaggtgctgctgctgcacatcgggcaggtgctggagccctgcgccaaggtgtgtccccgccatctccggctgctgcggaacctgctgacactctccgccgggaagaacttgcagctctcccgccgggtgctgcacacctcacccaagtccatccgcaagcggctgctgtcctatttctcggagtgcatcaagcgcaccggcagctacgaattcgacatcccctacaaccgccagcagctggcggactacctgaacgtggagcgcagcgcgctgagtaacgagctgtccctcatgcagcgggatgggctgatccggtacgagaaaaaccactttgccgtgacggagcagttagggcagcggtgaaaaaacagggaagcgtgcggcgtggtaggatggttcgcttttgtcggcgtgtgcgctataagtgtgctacgaaccggctttttgagatttgttgacctttcaacgaaaaaacttgacttaattaggcaaataatactttgatgcaccaaaaaacggcataaatttccctgcaactataagtatatgggcggttgcacatttaggatattaaaacatgcccaaaatgcacatacaatacaagttaagaacacttcatctgcaggagacttgtttgtatgatagactacgcatttataggcgcacggctcaaggaagcgcgcatacggaaaaacatgacgcaggagcagctggctgcgatgactgatgtggggtctacacatatcagccatattgaaaccggcatgacgatccccagcacaaagctgcttgtgcaaatgatgaatattctggactgtgatcccgccgaggtgctgtgcatggaaatgcgcagtgcgcggcctgtcctgaacagttggctttctgatctggtcgcagattgtaacgaggatgaagtaaaaatcatcacggatactgttatggcactgaaggcaagcctgcaccgtaaccgaagcgaagataaataaaggggataagccctcttttgcatattctgcaaaggttgggcttcatttttttaccgacacacaccaaaaagaccttgcctgaactatggacaagatacaaagtgacgctaaagacagccctttacgcgaatacgttttgagctgagacaacgccgaatatcaaaacgcccgcattctgccctgagcagaatgcgggcgtttttcttgtgtcgaaaagcaacaaaaaacaccgtgcggtgcagaggtccgcccataatggccgttcccccaacgaaaccattatgataaaggaggcctgctgccatgcgggatagtcagtacaagtcgtgcgcggtacagaaccagtttacagcctatctgattgccgcgattcgcaattacaaaagaacgtatttaaggagaatttccacagctcttcggacagaactgcccatggagggacacagcgaggtgatggaattatgtgaggaaacggacttcttctgtgggctgtcgctgatgcagcgattggagaatgagcgtctgttcgctgctatgcaagggttaagcgagcgagagcgttacatatttctgtctaaagtccttggagagatgagtctttccgagattgcgctgtcgctcggtatcacctatggagctgcggccatgtcctatcatcgcacggtctcgcgcctgagaaacgctgtgggaggtggtaaaggtgaatgatttcatggagctgttcatgagtgcgaagaccggggattcgtctgcaatggaggaacttctgcatatgtactacccgctcttatacaaggaatccgtggtcaacgggatctttgatgaggatctgcttcaggaactgtgcctgctgttcttaaagtgcgtggcaaagttcaatattcgatagagagaaatctcccgtcgcattctaaggaaattatggtttagccgctgcatggaagaagcccagttcgcatgaaaggcgagctgggcttcccaatttcactaataactatacattttcaagtctctcaacggcttcttcataggtatataccggcagaaacctcgtcccttcgcagaccgccgagaacacggggggatgacctcctgcatcgcaggcgaacactccttctgcctctacggcggcattcagtcgctccaagtacatatagaggttcccggaacgatccatcctatattccggtgcagagccaatctgatgctgccccatataaagccgcgtttcttccggcaggggcatcaacagcttacacgtggctgcccgcgacggtcgttccaccatcggagcaaagaggctgctttgctctccaaacatggagccgcgcgcgtgtacgcgctccttatacgggaagtgacaggtgttttgccaaaacatagcggttagcctgcggacattctcgcacatggcataggtatcgatcatctcatggggacggtgttcattgaaataacctgcgctgatattgacagccgcagttttcaagtgcggtgcgaccacagagatgtcgctgaacgagccggagttctccttgaaaccgaagctgcaaacgaactccatgaagtcagggttatcgcagtgatagaatacggcgtcattcctgccgcgccgatccaattcaacgatatagttgacctccggacgcagcttgctgttggtaaatttccttgcacccacaccgccgagctcctcgtcttcgcaaaacaagatatgacaatggcactcgcgcatcagcatcaagatcatatacacaccggcacggtcatcaccgccgatcccgtagggcgacatcaggtagcgtccatcctcggagcagcagatgatgtccggccgatgggtatgaaccgtgtccagatgggcaaccagcaacacggggacagtgccttctgcataaagaaatccgcttttacagacgggttcatagtcgtgcgcgcgcagctgctgcacaagatgctctttcagctcgcgctgggtcatcttcaagatgctttcaaaatgggatatactcattcccatagcttcgcaaatattcattatgctcctcctcacgccaccgctacggtagctttttcacaaagcgtatgacccatagcacgacaggcggaggccatgctgcacgatgcgcaaccggaagtcaactgctggtagcagtcctgacagacctccaccaaggtgccgcgccggttataagctggatacatagtgcctaaagtggggcggccgcaggcggcgcaaatatgcaggcacgtcttgcagtaaaaaccatcttcaagatagattccttgaccacgcgctaccgtctgcccgcatttacggcagacggccacctctttgcaagaacacttgatggcaccattgctccgcagctcattaccgcagcagacacacttggctgcagctccgatggtcaactccgtgtcctttctatgtccctgcagaaccgagagattaccatgataattatagtccggataatgtaagctgcctcgataggtcgagagatgggcgttcaagtcaggacgttttgttttcaggtaccagaggtttggttccgtcaggcatcgggaaatagccttctgcaccagatggcggaacagcttggacacttccagcgcgtttcctgtatcggcaggataaagccgggactggaacagggtgccgttttcatagaaaaacatctgccggtatcggcgtatggctttgcggtattccccagaaacgtcggcatctacggcataaaataccatgctgactctatcgttcatataggaaagacaacctgcctgatatcctccgtcgctaaggcgatggcaggacacccatgtgttggatttgctggacatctccaaaaagtcacagggatgtacggagagaactccgatctcctgcatggtcaacgggttcagagcgtcggcaagctgtgcaaaaacggcgttgtaccgggtgtgcctatcgacgccgtatttcttgcaaagttttccaataatgcggctggccttctgatctttagcacagcgtatcccgccgcgctggcgtaggatctccagattttcttcagaaacggtgcagctatagcctgacacggccgcatgcagtgctgtgcggaaatcctccagctgctcaccgctgatcatctcagaggcgatgtccagcagcgtgaaggccgtttcatctaccatatcaggatgaatagagagggcctgattacagtcgaagatgatagcctgttcatcctcgttccaattgggatgacgccgcagcagtgaaagcagatccgctttcgctgtctgccaggttgtcagattagccataacaccctcttccgaaaaactcttttcgtatttgtacataacctcataaaactcgtttttcagctctgtgagctctttcacttcattcacacctttcttgcattttagagtggaggggtagagagcactgcgcactctaccccttttgcgactaacggccgcgcctcattctccgatcatctggaaaaactcgcccggcgacagtacacggatgcccaaggcacgtgccttatccagcttactgccggcgttttcaccacagatcagatagtcggtcttttttgttacagaactgccggccacagcacccaacgattcgatcttcgcgttgatgccgctgcgggtatagggctcgacctttccggtcacaaccatcgtgcagcccacgaacgggttgctctccattgagtgcgtttcggtagttacggtttggatcgtcaccatttcttgtaattcctcccaaagaatacgattctcttcttgtgcgaaccattgatgaatgttttggtgcagtgtttctccaaaatcgggaagctgtgagaaatcgaaatcattttccacggcttcttcgaaagcggaaggcgagctgccaaactgcttcgccagcactttgctggcgtgattacctatcatcgggatgtccatggcaatcaggtacctctcaaatgtggtatttctgctgcgctgtatggcaccccacagattatcccacgatttcttgccaaatccgtccatgcagatgatctcctgcatatagtgatccaggcgatagacgtctgtgaaactgtgtagccagccgcgagcaatcaaacgctccagtgtggcctcggataagccctcaatatccatagcttttttgctgacaaaatgcacgaaccgccgaagctttcgcacggcgcagtctgggttatcacagaagagtgcctttttccctccgtctgtaatatgaaaccgcgtttctgcaccgcagcaggggcagtgcttcggcgttacagcatccagatcaaaatgcccacgctccagattctcctcaatatgaggaatgatcatgtttcgcttggacaccaacacacggcagccgggcatcagctcaagactctcaatgaaagataagttgtgcaggctggcacgcgatacggtgcatccatcgatcactacgctgtcgagtaccgccaccggcgcgatctcgccggtgcgcgaaggtgtccattcgatatcccgcaggacgctttggtataactcgtcctcaaatttgaaggcgagtccatccttgaagtgatgaccggtgcgcccgcaggtcctggagtagtccacctcatcgtaggtcaggacaagaccatcgatggggagatcgctcttttctgcggcctcgcgcatttgggctatgagctgttcatattgtgccttgtcgccattctgcaactgtacggcatgaatgacgccgaacccaaactcagtgagtttcagaagccgcgcatgttttccgtttgcccagtccgtgtgctcctcgaatccttccaaaaccgagaagggaagaaatgacacatggcgctgggcgcagatcgctgcgtcaaaagcccttatggacccggctgccagattgcggctgttcttatacggattgcctgcgctgtccgtgatggatttcaggctctcaaaatcgctgttgtggatgaagctctcgccgacgaccaccaatcgatcttcataggggatgcgttcgggaatgccggagatcgcctttgcgttgtgtgtgatattctcgccgatatacccatctccgcgcgttgagaggcggataagctgaccgttttcatagatcaactctgttgtcagaccatccagcttcagtgacagatcaactgtacgccctgcctgaaatgcgatcagagcctcaatgctcttggccttatcaagcgatagcaggggaatgtcgtgtgcgacctttggtaatgctgacacgacaggatacccaaccgtctgtgtgggcgaattcgccatgcagacaccggtatgctcctccaacgccagtaattcatcgtacatatagtcgtacacatcatctgctacactgggggcattgaggttgtagtattcgtgccggtatcggttgagttgtgcgaccagctttctcatagtgctcatttctactgcgttagccattatgttcattcctttcgttgatactatcaccgaaattcagctttcggatcatggcaagaatagcgttatcgtcattccacggtgcagaccatggctgcggggaaatggtgtcataacgcacgaagacctggccctccgaaatttgcaaggatacatctgcgcgtttcgcgcagacgatggcaagattccctaattgtttcatactgtccaactccttttttaagctgcggccttatcggaggcatacagcacccgctgtttccattgttcaataaatgccgtgatctgagccggaggctccttgttgtcaaagcctcgtgcctgcgtaacctgaccatcctttacctctacggtacaaagtgatttatccggctcgtcaacactcctcacaaagagaatgacgctctttttttcggcaacatttttaacatagagtctcacacagtgatgaagcgccgcaccttcatccacgatctcttttgcggaatgcggagggatcatcatgagttctttgctctgatactgataccgcttctgccattcgtcaaagctgcctgcgatagctttttcatgctctgccgtgcgtttgtccttcagtgtctttgctacactgtcatgggcagccttcagctcgcgcggaaacaatatgaagctatttttcacgtcatattgcagttccttgcacatacaaagatagtcatggtagtcggtgatcagcgtgttcatcttgtaatagtctacacgcttcaaagccgcttcatcttccggagcaaactgctgctccacataacgctgcagtttatgcacactcatgtgagcaagcaactctttcgccgcgtcggcattgctgatcttgctggcaataaaccactttatttgttccgtgctcggtttgtgatctgcttggagcagctgacgaatcagatgtaattggtcgattgaaggattcaactcccgtaagagtggaaaataaggccgatcaatacctaatatggcccgcatgttctcaccgttgaaattgatggcttgaagtgcggagtaactataacctccatatatgatgccactcaccaagcggtaaagcttcatcttgatcaaatgctcaatcttgggccgttttatatatgcactcaagaatgttgccactcccgaaaacgaagcgatgccggaaaatgcctccagctgtgaataggcccacggcgtatccttcagcgtatcagataagttgcgttgatataagaccccgctcatatctgccgtaaaattatatttccaccggtcgaataccgggcggtatccattgcaccacggagtcaaatcgtatccagccttataatgatagtagtaggcatcaacgctgcactgtccgctcgatgaaagggtaataaactgccgtgcattttcccagatctcaaaatggtttgggatgtctgagtcagcaaacgaacggtacacctttatgatccgcagtaccagtccgttaccctccgccttttgcagcacttgaaccgtttcgcggtcaaaaatacgtccacgccttcctctgcacttgaatgtgatcttctttttgcagcgagggcagaggccggaggtgttgtgcttagctgccgcaatacggacctcgtgccggcaagcggtacaatatgcatgccccggcgcttttcgctggtaatcatagaagatatactgcggcatgacttcgcggtggataaaacctttaaggtctcggggcagcactggcacatatttcatccggtctatgatcgcacgctgctttttccacttacgttctaactccttgcggtatgaaatcagccgttgcagataacctaacattgaaatagcgccgcgctcacatttacaaaagcgagctacgcgagattcgtcctgctgccggtagaaagcacacttactgtcaaagcctcctattcggtccaaggaacccaatgttgagcattgccatgtggccttcgcatcctctctaaatgaaagtgtggcgaaatcatcccggctgtggaacatgacccaacggggtttgatgctgcccgccagaatgctctccctctgatagatatagagcaccaggatacgctgcccggcaatattctgcactgccgtgcggataatataggggtagctctctacatgaagcacgccttcattcagattgaattccagttccggcatggcaaacttgcggcaggcgcgtttgtctattttacgagtcatgcgctcacccccaggctatcgaaagagatctgttcgtccaagggtgcagcttccgttggcgtgtcggctggtttttcctccgctttggcggcgggcttctccgcttttttcttctccgcctttttcgtcgtgctgctcctgccgccgtaatacggtttaggaacaaacttttcttcttgaccacgatcctcctttgcgttcatatctttgaagtaatcctccgcccactggtagcaaagcccgtccggcacgtcggtgccgtagccttcagccgagggcttgacgtcattgtcctccatctcctgcttggcaaactcaaatgccctgcgtttgatataacggaagcagttgaccatgttcttgcgggggtgcatgacattccgggcaaaggccacatcctcaaggcaaagcgtctggatatactcggtgacgcactgcttcatgttgcggcgtgtcagtcgttcggaatcgtcgcccacacgcttcatagaggcggccatcacttcgtcatcgctcatcgctaccgcgttttcccatgcggcctgttcagattcctccttggctcgctgcctggcctcccactcggctttccgcttggcctcagcctgctcatgctcctgccgcttacgatcctcttccgcctttttatctgctttcagattggaaggtggaggggaatcatctgcgttttgctgcatctgggagagcagagccttcgcctgctcctcctcagcctgctgccggtcgtctgcccgtctggacgccaactctgcggcatcctgtatcgccgggcttcgatcctgtacattatcccgcaagtctgcggccatctctgaatatactcccataaggctcctccatttcaaaataaaacggcattgggcgggtgatagaaacacctgcccgatgccgttcgtttatggtggaacagctcagtgccgttcccgtttatcttttgccagctttggcgagaactttaccggcaggaatttatcattcccatcacagtaaaagtatctgcgcccgttttcgtcaaagaactcgatcaccgtggagggtgaaacgctacgtccatgatagtccgcaggcagctcgccgctgtatcgcgccgccaccagtttcagacggatggcgtcgtcctgctgcacttcacacaccagagctccttcatagaccagcgcgtactccgaggcaggcggctgttcatagccggccttctgcaaagccctgatcccgccaaaggcgaaatctgcggccttgccctcagatacatccggctggtagatacggaaacactgctgcgctcgcagggataaaagatactgctccagtgccgcgtcaccatcccgcaaaaagcgggcgtactcctgctcactcagacccaggtgatcgtggagcgtactgctgcagatgttcctctcgtgccatgcggcgatctcctcactgatggcgtcaaaggaacagagcccgcagacaaaccgcgttctgaaattcatttgagaaacatctctttgctcttttttctgccgcatggcaagctgccagtcatcaatgcctttataattcggatcccacgtcaggcggcggcactccaacccatggctgcgtgccatgagatagattttcgacgcgcccttgctgacagcggcgttgtgatacttgtccatatcctcggcttcaatgatgacctctgtgccattggtggccagcagcgcaaacagcatatccagcttgttgacgttgttggcacctgccgtagccgcaaaggagcgatccatcagaaagtgggccacgtccgctttcaacagcccttccgtcacatagacaacccgcgcaaagggatcgcccacgaaatggacaggactgccggaggatactccgcgtttcttggaagcggaggatagccacaggtactttgtcccgctcttgtcagggtcgctctcctgctctcggataggcgtatccaaccggatctgtgcgccgcgtatcatcccatcaatacctttggcggggatgatgatccctgccgtgacggaattgaagttgaccgtccatttgtcatccttacctacatagaagccgggaacgccctccaccttacagcctcggctgcgcagcttttgcgccagtgaccggcacaggtagaagggcggggtacttttgtaccccagccgttctatctgttcgtcggtcagcccgcgcacctcccggagatgcttgcggtgttgaggcgtaagcgtcaacagctccagcagcatggaaaatgtctggtggatctcctgcggtgaggcaaggacggattgctcaatcgccgtctgctccggcagcacctttgcggtgtactccggcgccgtaaggccgttttgcagcgtgtcgcagatctcacggtaggcttcagaattgctgatcccgtatacctttccgtagagagacagcataccgccgccttcgttgcagtagttgcagcgccagaggtttttagcaaagttgatgttcatcttcccccgcttatcaccgcagatcgggcagtcggcatatacgctgtccgcctgtctgcgccggatatgcagatgcagcagctcagccacatccatgatattgaacgggaactcctgtggctgcgccaccgcgccacctccttaccatcatctcgaacgattcgtctgtcagctggcatttgccagacgctggagcttgtccagcatcagcttggcaccggcccgcaggatattgtcatccccggaatagcccttcacataccacttgaggctggctggccgccgctcggcgacttgcttgagcgtctgtccgctgcatgtgccgatgggcacgatgatctcctcggcctccgcttcggtcatcagagtgcagatggtatccacatccatgtccttggtataactggcggcacttggctcgtcatatacgaagggcagttccgtttctaccacaggctctacaacggcctccgcaggctgttccgcagagacttccaccggcgccgtgtcaggtacggctttttctgcatggtgaaccacttcctgttcaggttgttgtacgaccacaggctcaatatcggcccgtaccgcagcaggttccgttctgacctgttccgctgccgcttgaggtgcaggggccggctcgctccgcataacaggcgtgatcggctctgcgtaaggcgtatccgccttgggcatcggtgcgaactggacgccgaagccggcgttggtcagcgccatgtccagagcatcatgctccgcagcctgaatatacagaccggcaggtgcgttttcctgtgtcatggtggcaatgtagctgctggcggggtcggcatcatccttgtcgaagaatacctttgcctcgatgatcgccaactgatccgtgatgcgcagcggcgtcagccgcgtgcgtccggcgggatatttcagcctgaaccagagctttttatatcgcagatccagctcgtgtccgttggcagtctttttcaagaatcgcaacggatcgaagcctgcgacacggttcagctcagacacgacggggacagcattgaacaaagtggattcgggtgtattcatttcaaaagctcctttctaaataaaaacatgagacagggcgtagatttaacgcgcttgcctcatttttacaaaatattcacagtgatactcaagcactgcgctgttgcactttgaacgtattggtatagagtgagatcctttgtcctaactgcgtgttgcgttttccggtatcgtctttgtgaaccgccatgtagagcatgccgatctgacccaccagaatgacctttgacttagcgcgggtgatagccgtgtagacaaggctccgcgtcagcatccgggcatggctcctcagcaaagggaatagtaccacatcaaactcactgccctgcgccttatggacggtggtagcataggcaagctccacatggcccatttcctccatggagtactccacgaccctcgtgggcgaaaactggatcgatatgcgcataccatcccgctcatcatggcgaaaactgcggataaagccaatatcgccattggacgccttaatactgttcttgttctgcatcaccttatcacctacccgaaaatagaggctgcccaccttcagatcggcttcctccgtctgcgggttcaccagctctcggatcgcctcgttgagttggtcaacggaggccgcgccggtggagcggaagggcgataggatctgcacgcggtctacaccgtattgcttcacctgtgccagatagagattccgcaggtgttcggcggcttcctcctggttggcgcatttgcagacagtaaaatcattgccgtagaaaaagccggtgtcattgttgttgatcttctgcgcgttataggcgataaggctgtccttcttctgacggaatatctcattgagcaccgtcacagggatcagcccgcagtcgatcaactcacggaacacatcaccggctccaacgctttgcagctggtctgcatcgcccaccagcagaaccttcgtgttcggcccaatgcgggagaagaactgccgtgctagccacatatccatcatagacgattcatccacgatgataaggcctgcgtccagcatatcttcctcacctttccggaagccgccatcctcaccaaacagtcccagcaggctgtgcagcgtgctggcattgtttacgccggtactctccgccatgcggcggcttgcccggccggtgggggctgccagcaggatattctccgatggcttcagcagcttgaacacctcaatgaccgctttcaggacggtggtcttgccggtaccgggtgagccggtaatgatggacagatcgctgcggaataccatgtgaacagcctccgtctgccgcagagagagctcgacccccaactgacgccgtacccttgtcagcaagtcctgcacatccacccgttctaccgggcggcagagcagccttgcgatgctgcgagcggtttcgtcctcctgcgcgaaggtcttgaccagataatagttgccgttgctgttaatgatcttgccttgcagcagcatgtcgtcgatcacagcctccagatcatctgcctttacccgcatctgaggaacggggatcatgctgttcagcagagccatggactccttgcgaagctgctctgcatccagatacagatgaccgccatctccctttgcaccctccagcgcggcaaataccgcaccgcggatacgcatgggggaattgaggggccagttgttctttcgcatgatcgcgtccacacgtttgaaaccgaaaccagacacctggcagagttcaaaggggttatcccgcaggatatccacgctgtgtgcgccgaaatggtcataaatctttgtggcggtggtgggggtgatctgaaagggggccaatagcagcatcagatcacgaagtgttcggctctcgttataggaggcaatgatctcctccagctttgccttgctgacaccccgtatctccagcagccgctccggttcattctccagcacatgcagtgtatctgcgccaaaccggtctacgatcagctcggcggtcttgccgccaatgcccttgataagccgtgaggaaagataccccttgattccttcgcgggtctgaggtacgacctcctcacatttcgtcacatgcagctgaaagccgtttttaccctctttccactcaccgtccagtatcatgctgacctgatcggtgcgcggcagctcatagcccacggcggcaaaatggatcatattgtcccgatgccggtacgcgctgcgagccttttctgggatagaacggtctgaggtctttacgctgatcacgctgtacttgttgacagggttatagaagatcgtccgttcatagatgcctgtataagccaactcatgcagcctcctctcgtcgctttttcacatagaagcgccggctttccgaaacagtgacgtactgctcgtagatgtccgggtgctgcgcctgcaaacgctgcaggttgtccttactgatgccggatttacgcacaggcttatagctgatactgtaagccgcttcacgcccctggcagacagccgtgcagcttcgtcccatttctgcgacgatgcggccttgcagccgccgcatttccgcttcaatgtgctcatagtttcgtttctctgcgtttcgctgggtctgaagctccagataccgggggatcagcagtgccatattcccctccagtatcagctccggcgccgatgggtcagctggcccgaaatgacgtctgacgctgttaaggatcagatcgccgtcctccgtatagggtgggggcatgccggtgaggatgtggttctcccagaaatcctgctccagcgcgatcagctccgcctcatagtcccggttacggtcgatatgccggatgatgacttcatcttcattgttgccgtacaggcagcagtagaagacctcatcaatgttcatcacggccatatagtgccgcccctgagcctcatagttgaggggaacgatctcccgcccatcctcggaccaccagtgatcctttgcattatagttggtggtttttatttcgaggatcgcggttcgccctccgggaagctctacaaaatagtcaatatccgccagcataaacgtatgtactggatgataaaacatcttcttgatctgatagatgcgataccccgttttcacatggaatatctctgccaccagatcctccagcagatgccccatcttcttagctacccagttgctctccgagtcgtcaaaaggcacgattttcagcttgtcatagtagagatcccgtgccgcagcaaacggtgagattcctaatatggcggctgcatcgctgccgccgatccccctgcgccggtattccagccagtctttctcaggaagaccctccgtgctgaccaggactgacggtgcataagactcgcttgcgactgccatggctataccctccgctgccccgtctgatggggtacaacgcgggtatagctgcagcggtattttgccgccttccgctccgttttcctgagtttctgcctgcgtcggtctccttctcgataccgatacaagcgtttgccgggataattccttctgctcatgtggatgccacctttcaaatatattccaaagccttacggcatttgggtaaataaaaaaagcgagaatgacatcctgatcctctcggatacttgcgcctgccgatggcatggccggtgtcattctcgctgcaggggaaaatgtcccctcaaaaacaaaaaagtcaacagcccactgctctgcggcatagtggcgttgttgactaaaatacaagcttaacaacgtgtgcggttcagaaacactctgaaatgcctgtataggcgttgcacaaaaaacaattacatggtaatagtaccacaatatattgtggtagtcaagaaacaatatcgcccatatagagaatttgaaaaaatattacttcgcatgttaaatttacggtgcctgatttctttttatttagtgtaaggctaagccagtcagaagatgactggttctattacatgcaccttgaaaactgaacagccccaccggaggttatacaggagcggcggatagtgtgcgagaacataagggagcgcacccaccgcataagtgccgcacagcggcagcctgctaatacgcggtcgaagagagcgcaggaaatggaccggcaggtggcgcaaaaagcgataaggagatgtgatatggatcactacaaagatatagaagaaatccccatgatatttggcccgcgcgaattgtcaaagattatgggcatttctaaaaataagacttatgaggtcgtaaacaggtatgattttcctaaaatccgagttggcagaagaatcatcatcagcaaaaaacattttttggagtggatggacgccaactttggtaaagaacgcaacaatacataaaaggcacttttgttatttgctttgattcctgttgagttttccttcggaaagtcgtatagatattatgtgtggaaaaacctaaaggtttatatcccacatggtacgatttgtatgcctgtacgacagtaaggaggatcaataaaagtatgggcaaaaagaaagcaaatggagaaggatccattacaaaacgcaaagatggccgctacatgggacgctatacagtggaaagcaaacgaaaagcggtctatggcgattctttcgaggaggtgaggcagaaactcaacgagatactgaacgagattgcaaaaggtgcctacgtagaacccaataaatacagcgtggaaaaatggctgcgagaatggttagagttatatgccctgccaacggtgaagcggtcaacatacatctcctatgaaggatatgtacggatacaccttgtcccggagatagggcaaataaagctgacatctttgagcaccagggatctccagaagttctttaaggaaaaagccggtacagaagagaagaaggggttagctccgaagacgttgcggaatatttacaatatgcttcattcggcattagaccaagcagttgctgaccacaagattcttagaaatccgactttgaatgtcaaattgccaaaggtcaagtccaaagaaatgcgcgttctaaccgtggaagagcaggcggtattacaggacgctgtaagccgtgttgatgaattgcatgcctatgggataacctttgcagtcagtaccggggttcgtttgggtgaactgcttgccttgcgctggaaagatgtaaatgaaaaagaacactacatctacgtcaggcggacacttggcagactgcagaaggttgatgaaaaagggcatctcgttaaaaaagaaaaaggaactccatcaacggaaatcgttgtgcgttcgcctaaatctgagttgtccatgcgaaagataccattgttcgatgagttgtgggacgacttgatggcatacaaagaaaagcagaacgctctaaaggatgcactgggatcagagtatcaggatcagggctatatttttgccacgccactgggccatcacaacgatccgaaagtctaccaaacgctttttaagcgcatagtagccgctgccggaatcgagtctgcgaacttccatgcgctgcgtcatacgtttgcgacacgagcgttggagtcaggtatggacattaaggtcttgtctgcattactgggtcatgcgcaggcatcaactacgcttaatctctatggacatgtccttccggatcataagaagatcagcatggagaaaatgcgaggcaactatatgagctgcagtataagcggcagttctgatgatacttccgcagatgcaccgcagactcaagacccgaccattagcaccatagaggatgcccggcataatcaagagccgaccatcagcatcgctgcggaggatatccaaggactggaactgagtggtgacaccaatgcagctatgccccaaattcgcgatttagccattgacaccaacgcaaacgagaaacaagcgcaagcaagctgattttgacaccaacgcgttggagtcaaagcaaaagccatccacgccagaattgaaaaataacatcaaatgagcagcttattttttcagtatgacttgccagcaaaactggtgtcatttggtgtcagggaaacggttggtgtcaatcgttggtgtcaagagcatgaaagagtatcagaaaaccacactttcgcaacatcaaatatccgaaagcccgaacaatgcaggacgctgacacattggtgtcggttggtgtcacagcaaaatgagcaaagagatttaagggtgcggttaaaacaaaaagaaccgcaaaccctttgaaatcaatgggtttgcagttcctgtttggttgcggaggcaggacttgaacctgcgacctccgggttatgagcccgacgagctaccaactgctctactccgcgatatagagtttttgcggaatttagagctccgaagaatcggaaaagtctccgggttatgagcccgacgagctaccaactgctctactccgcgatattgtactgtaccgggtggtgccggtgaccggactcgaaccggtacggcattgctgccgggagattttaagtctcctgtgtctaccattccaccacaccggcggatcaggcacttgttagaataccacaccgcccggcctgtgtcaacaccttttggaaaaaacatttcgacaaagttataaaaccccgttgcgcgccgcgcttttctgcgctataatgtgtccacggaacaaactggaacaggaggaacatcctatgaatatttggcatgatattgcccccgcgcgggtaaagcccgaggatttctgggcggtcatcgagatcgaaaagggctccaagaacaaatacgagatggataaggataccggtatgctgcggctggaccgtatcctctacacctctacccactaccccgccaactacggcttcattccccgcacctgggccgacgacggcgaccctctggacgtgctggtgctgtgcagcgagtccatccgccccatgagtctggtgcgctgcttccccatcggcgtcatcaccatggaggacggcggcgacctggatgagaagatcatcgccatccccttcgaggatcccacctatcatctgtatacggatatttccgagctgcctgcccacgtggccagcgagatcaagcacttcttccgggtctataagagcctggagggcaaggagaccgtggtcagcgacgtgctgggccgtcaggcggcggtggatatcatcatcaagtgccaggatgcctacatcgagaaatactgcaagtgacataccgcgccgccatccccgccgatggcggcgctttttctgcgggcgggaaaccttttccgaaggaattgcgtctatataacagatgagccttttgaaaggaggcggatcctatgaaaaaacgtgcggcggcgctggtgctggcgctgctgatgctgctggccctgcccggctgcggtatcaaggcgcaggcactgaccaaggatatcgtgccccaggcactggacacgactaccgacctgaccgccggaggcgaggcggtgtcggccttcgccctgtcactgcttcgcagtgaacgggcgggagagacgggcgtgctgctgtcaccggtgtccatcctgaacgcactgggcatgacggccaacggcgccggtggaaataccctgaagcagatggaaacggcggcgggtatgagcctgaaccagctgaatgaatttctgtacacctaccgcatgagcctgccggccgtgtacaagagctgcgccgtttcgctggccaactccgcgtgggtgcgggataccttccgggtggaggacagcttcctgcgcgcctgcgtcaactactacaatgcggagatctatcgttccgcgttcgacggcagtctggtcaccgacctgaaccgctgggtcagcaaggagacaaacggcctgatcgacagtctgctggagcaggcacccggcgaggccaccatgctgtatctggtcaacgccgcctgctttgacgcccggtgggagacgccctacgaagcgtcggatatccgcgagggcgggaccttcaccgccgcctccggtgcgcgccagacggcggattacctgaccagcagcgagagcatctatctgtccggcaacaacgttaccggcttcctgaagccctatgacggcgggaaatatgcgttcgcagcgctgctgcccgatgagggcgtgacgctggaggactacctgaagaacctcaccggcgagcatctgtatcagctgatcaccggtcaccaatacgccgatgtgcaggcgtccatcccgcggtttaccgcccaaacggagttggagctggagaaggcgctgacggctatgggtatcacggacctgtttgacgtgtccagagctgatctgcgggccataggcagcgcgcccagcggcaataatctgtacgtctcctctgtgctgcacaagacgtatctgtcgctggacgagaatggcaccagggccgccgcggccacgtcagtgcaggtgaacggcggcagcgcgcggcccaccgacgtcaagaccgtgacgctggatcgccccttcctctacatggtcgtggacacccacgcctgcgtgcccctgttcatgggcaccgtcacatctatggaataagcgaaaagaacgcccgacagggcgttcttttcgcttattcgccgccgttcacatagtcgtgggggtcgatgaccgccccgtcccggctgacggagaagtgcaggtgcggccccatgcggctctcggcggcggaggtggcccccacccggccgatgacctctccggcggccacctgctgcccttgctgcaccggcacgtccgcctgcaggctgctgtactgggtggcgtacccgccgtcgtgctgaatgaccaccgtggtgcccatcagctcgtcgtcggtaacggactgcacggtccctgcggcggcggtcttcaccgccgcgccctcgtcggcctgcacgtcgatgccgtcgtgggtgcgccagtcggccatagtggggtcatataacagctccgtcatgctgaacaccgtcactgtggtgccgtccagaggggataccacctggggcagcagctctgccggctcggtgatctccacctcctccaccgggtcggggatgaccaccggcgcgggctttaccaccggctgggtgggggtgacgggctggatatccagcaccggcggcgtgtccgtctgctccacggtcaccgggcgctctctcagggcaaaatagccgatcgttcctgcggccacaaggcacagggcgatggctatgtaatagccccgcccggcgaacatagcccgcagccgttcgtttcgggagtccttcatatgcgtgtccctttcctggcgggaagtcccgccgccgccccttccggcgggcggcacgccgaaataaaacatcctctgcccgtattgtcgccggacagaggatgttttattcatattcagtcgtcgaattccgcccgcaggccccgccgcagcaagccgctcagctctgcccggggatcggcgctttcgtacaggatgttgtgtaccgccatgcatatcggcagctccacgccgtgcttttcgcggagcaccatcagtgcctccactgtgtaatagccctccgccagccggtgatagtcctgatggcggatgaaggactcgccgaactgtcggttatggctgtagggcgagaacaccgtggcctcgtagtcccccagatggcacagcccgtaggcggacagctcattgccgcccatagccttgatcagccgcgccacctcccgggtgccccggctcatcagcgcgcccttcaggctggacatctccacgccgtccagaaaacccgccgcgatgcctaccacgttcttggccgcggcgcctacctcgttgccgatcatgtcgccgccatagtagaaacggatcaggtcgctggagaattcctgtaccagtcggcgctttacagcgtcgttcccgctgtcgatgaccatgcagttggggatgccccggtagaactcctgcacatggcccggccccagccagaccgccacggtgttgctctcatgcagcagtgatccggcgataacgctgagccgttcgccggtgcccatctccaggcccttcatgcacagcaccaccgtcttgcttcgcagggcctgcataggcgcctctgccagcagagaacgcaggctctgggagccgatggagatgatgaccgtctccgcctgctccacgtcccgcaggtcggtggtcagccccacggagtctggcagcgtcagcagatcgttctgccgggtggccagaaaggactgcatacggggcgagctctgccgcccgtacagcgtcacatgatggccgatgtgatccagataccaggtgatgagggaaccccaccgcccgcagccgatgacaaatatgttcatgggtttgtctccttataaggaagtcccgaagccgcgcttcgggacttcgcgtaaaagcggatcgttcgttttacttcacgatcagcgtcttgccgtccatctcctccgggcaggccagacccatcacgtccaggatggtgggcgcgatgtccgccagccggccgggccgcagctctgtgccggcgccgcacaggataaagggcaccggattggtggtgtgggcggtcatggggctgccgtcgggctgcttcatatcctcggcgttgccgtggtcggcggtcaccatggcgataccgcccatcttcagcgtggcgtccaccaccttgcccacgcaggtgtccactgtctccacggccttgatggcggcctccagcacgccggtgtgccccaccatgtcgcagttggcaaagttcaggatgatgacgtcataggcgcctgactcgatgcgctccacacacttgtcgcacacctcgaaggcgctcatctccggctggagatcataggtggccaccttgggagagggcaccagcacccggtcctcgccggggtactgcgtctccacgccgccgttgaagaagaacgtcacatgggcatacttctccgtctcggcgatccgcagctgggtcatgcccatgcggctgaggtactcacccagcccgttcttcacggcgatgcggggccacgccaccagcacgttgggcatggaggcgtcgtactccgtgttgcacacataggtggtggggaagaactcccgggcaaagccgtcaaagtccgggtccacgatggcccgggtgatctcccgggcccggtcgggccggtagttgaagaagatgatgctgtcattgtcgctgatggtgccgtcgccgtccacaaccaccggctccatgaactcgtcggtgatgttgttggcatagctctccgccacggcggccaccgggtcgtcgctgcggcggccctcgccgtataccatggcgtcataggccatctgtacgcgctcccaccgcttgtcgcggtccatggcgtagtagcggcccatcaccgtggcgatcctgccgacgcccagctgggcgcacttgtcggcgagcgcctgcacgaagcccttgccgctggtgggggacacgtcccggccatccaggaagcaatggacgtacaccttggtcagccccttgtccttagccatttgcagcagggcgaacaggtgctcgatgtgggagtgtacgccgccgtccgacagcagaccgcacaggtgcagactggtgcccttctccaggcagttgtccatcgcctggttataggcctcgttcttaaagaagctgccgtcctcgatagcacggctgatgcggggcaggtcctgaaacaccacgcggccgccgccgatgttggtgtggcctacctcgctgttgcccatctgcccggcgggcagacccacgtccagtccgctggcggacagcgtggtgtgggcgtattcctgaaacagcttatccagcaccggcgtcttggccagagtgacggcattgtcgtccgcggggggcgcaatgccgaagccgtccatgatgatgagggtggtaggggtcttattcatgccgttcctccttggaaatgctcagccttggttggcagcattgatgatggcgataaagtcctcagggttcagagaggcgccgccgataaggccgccgtcgatgtccggctgggccagcagctccgccgcgttggcgggcttcatggagccgccgtactggatggtgatgctgcgggcgatacgggcgccgtacaggtgacgcacggtggtgcggatgaaggtgcagacctcagcggcctgctcggcggtagcggtcttgccggtgccgatggcccacacaggctcataggcgatcacgcacttccgcagcttctccgcgggcacgccggccagggcggacttgacctgcagcgcgatcagctccatggtgatgcccagctcccgctgctccagcgtctcacccacgcagatgatggggtgcagacccgcctccagcgcggagagcaccttgcggttgacggtgagatccgtctcgccgaaatactggcggcgctcagagtgaccgatgatgacgtactttacgcccaggtccttcagcatatcggcggagacttcgccggtgtacgcgccgttcttctcataaaacacattctgtgcgcccacggacacgcgggcatccttgaagcccttgatggcggcggcgatatctacggagggcacgcacaccacaatgtcgcaccatttggccttgggcagcagggccttcagttcctcggcaaacttcttcgtctcgctggcggtcttgttcatcttccagttgccggcgataatggtcttgcgatatctgcgattcataacaaactaactcctcgtcttttacttttatatagaaatggggatatgcacacaaaataaaacggttttcgccaaagcctgcgcggccgatccgctccgctggccgcggcgaagctgccggaccttacttgtccagcaggcaggccacgccgggcagctccttaccctccaggaactccagcgacgcgccgccgccggtgctgatgtgggtgatcttgtcggcaaagcccagctgctccaccgccgccgcgctgtcgccgccgcccacgatggtcacggcgccgctgtcagccagcgcctgggccatggcccgggtgccggcggcgaagttgtcgaactcaaacacgcccatggggccgttccacaccacggtgcccgcgcccttcacggcgtcgcagaaggtcttgatggtgtcgggaccgatatccataccctcccagctctcgggaatggccatggtgctgaccacctggcgcttggcgtcattggagaagtcgtccgccgccacggtgtctgtgggcagcagaagcttcacgccgttctttttggccttttcgatcatttccagggcgtaatccagcttatccggttcgcacaggctcttgccgatgctgccgccctgggccttggcaaaggtatacgccatgccgccgccgatgatgatggtgtctgccttgtccagcaggttgttgatgaccgcgatcttgtcgctgaccttggcaccgcccagcaccgccacaaagggccgcttggggtcgtccagggccttgcccatgacggacagctctctggccaccaggaagccggacaccgccggcaggtatgccgccacaccgacggtggaggcgtgggcacggtgcacggtgccgaaggcgtcggacacatacagctccgccatgtccgccagctccttggcgaagccggggtcgttcttctcctcgcggatatcgaaccgcaggttctccagcagcatgatctggccgggctgcagggcagcggccttggctttggcatcttcacccacgatatccttggcgaagatgacctcccggcccagcagctggctcaaacgctccgccacgggcgccagcgtcagcttcatcttccactcacccttgggcttgcccaggtgggagcaggcgatgaccgccgcgccgttgtccagcagatacttgatggtgggcagtgccgccacgatgcgcttgtcgctggtgatcgcgcccgtttccttgtcctggggcacgttgaagtcgcagcgcagcaggaccttcttgcccttgacgtctacatcctgtactgtttttttattgtaattcatggaatacgctcctctcacgtgaaattcatatatttgccatctcgccggttccggcgagaccgggaaagccattctgccgcagcgcctcataggtgaggatcgccacggagttgctcaggttcaggctccgcgcctccgggcgcatgggcagccgtatgcaccggtcatagtgggtcctgcggaagtcctccggcagcccggctgtctccttgccgaagaacagccagcaatccggcgagaaccgtgcccgggtgtagtcctgcggtgccttggtggtggccagccacagatcggcggccgcctccgggtgccgcgcaaacagcgcctccagcccgtcgtagtcctgtacgttcaccaggtgccagtaatccagtccggcacgcttcaccgcccggtcggaaatatcaaagcccagaggccgcaccaggtgcagctggctgccggtggcggcgcaggtgcgggcgatattaccgcaattctggggtatttccggttcgaccagtacgatgtgcagcatgaccgtatcacactcctattacataagcgacaactattgtaaaacaatgtaatgggaaatgcaactataaaataccaaaagcaggcgatatttctccgaaacattcaaaatactttctgtttgacccaccaaaagacagacgaacgcccacggaccgctgccggaaaaattattgccgaaaaaaacgggaaaaatactggattttcccgcaggacctgttataataggggcagagaacaatgcagaaagaggtgagtgccaatgggccgcattcgcgccgacaagtgcaatactgtccatgaccgcacccgcctttcgggtgccgtgccgtccacgctgtacgccgcgctgtagagcgcactgtcagtgggcggcatttttgttttctttttaacaagtgcggaacagcgcagctgtttgcaatatacctgtacctataaaaattcggatagaaagcgagagtacgcaccatgatttctcacggcaaggatatgaagatctttacaggcaacgccaatcccgcgctggcacaggagatctgcaagctcatcggcatcaagctgggcgaggcagaggttaaaagcttcgctgacggtgaggcgtccgtctccctgtacgagaccgtccgcggcagcgatgtgttcctcatcaactccacctgcaaacccgtcaacgacagcctgatggagctgctcatcatgatcgacgcctgcaagcgcgccagcgccggccgtgtcaccgccgtgatcccctatttcggctatgcccgtcaggaccgtaaggccaagtcccgcgaccctatctccgccaagctggtggccaatatgctcaccgcctccggcgccgaccgcgtgctgaccatggacctgcacgccagccagatccaaggtttcttcgatatccccgtggataacctgctgggcaaccccgtgttcgtggactattacgccaagaagttcggcgaaaagtgcgaggacatggtggtcgtctctcccgatgtgggctctgtggcccgcgcccgcaccttcgcccagaagctgcacatgggcctggccatcgtggacaagcgccgccagaaggccaaccagtgcgaggtcatgaacgtcatcggcgacgtggagggcaaggactgcatcctcttcgacgatatgatcgacaccgctggttccatctgcaacgccgccaaggctattgtggaggtgggcggagccaacagcgtatatgcctgcgccagccacggcgtgctgtccggccccgcgctggagcgcctgaacaacagcgtcatcaaggaggtcgctctgctgaacaccattcccgagtctatgggcgagggctgcgacaagatcaagtatatctccgtggcccccatgttcgccgaggccatcgagcgcatctatcaggagatctccatcgccaagctgttcaactaaaatactttccaaacccgaaaaacggtgctataataagaggactgcgtctgcagtcctcttattttgtgcatgcaaggaggcgacagccttgttttttaatcggaacggcagcggaggcgtggagtggctgctggtgggcctgggtaatcccggcagcaagtacgagtccacccgccacaatatgggctggctggccctggacagcctgatggaaaaggagaaatttgccctgaataagctccgcttcaaggcatggaccggtatgctggactacaaggggcataaaatactggtgatgaagccccagacctacatgaacctctccggcgagtccgtgggcgaggccgcgcggttttacaaggtacccgccgaccatgtgctggtcatctccgacgacgtgtccctgccggtgggcaagctgcgtatccgcaaaagcggctccgccggcggtcacaacgggctgaagaacatcattcagcacctgggcaccgatgcgtttccacgtatcaaggtgggtgtggggatgcccgatcacccggatcacgagatgatcgactgggtcatcggcaagccccagggcgaggaggccaagaccctccgcgctgccctggaccgtgcagccgatgccgccctgtccgtcattgatgaaggcccggaccgggctatgaacagatttaactgaccggcacgaagtgccgccggaggggaaaggagggatgccccgtgaccggattgttagacaagttatctgctctgccgcagcttcaggagctgctggcggcgctgcacagcagcgccgttacctgctgcgctgccgtgacggggcttgcccccgtccaccgggccatgttctccgccgcgctggcggcagagacgaagcgtccgctgctgctcctgtgtgccgatgagaaggacgttcagcgtcaggcggcggatatccgcgttctgctgggcgtggagccggtgtgcttgccggagcgcgaattgcagctgcgccccgccgcttacagccgccagtgggagaatgcccggctgtccgccttgtaccgtatggcccggggcgacgcccccgttgtggtgaccaccgccgccgccctggtgcagcgctgtctgtcccgggaggtgctgctcgccgccgccttttctctggaggtgggcgcgcggtacgacgtgcaggacctctgccgccgtctgaccgccgccggctacacccgcaccgatcaggtggaggggcccggtcagtttgccctgcggggcggtattctggacgtgttctcccccggggaggagcgcccgctgcgttgtgagtttttcgacgacgagctggatagcctgggcgaattcgagacagccacacagcgccgcgtgctgaaccgccgccaggtgtgtattctgccggcgtccgagctgctgccctttgccgaagagaccaccgccgccgacgccgccgggcgcatggaggatgccgcccgccgcctgaagaaggagcacgccgccattcgtcagcgtctgctggacgatgccgaactgctgcgccaggggatcgcgccacccggcgcggaccgctatatggccgccgtctgcccggacaagaccaccgcgtttgactatctagcccaggacaccatcctctgtgccggcgaggccggccgggtgcaggagacgcttcgggcctttctgtttcagacccgccaggatgttaccgccgccgtggaggccggcctcatggccggcgccttcggcgacctgacccttacggagccggagctggagacggtgctctcccgctttgccctctgccagctggagagcctgcccaccagccgctatctgctgccgccccgcctgctgctggacgtcagcgccaagcagctctccggctacggcggcagcctggatgccgccgccaccgacatcacccactatctgaccgccggcttcggcgtgctggtgctctgcggcggcgcggtccgctgccgtaatatgcaggagtttctccagcggcgccatatccccgccgccctggcgctggagggcgatgccgtccccgccccgggccagacgctcgtctccgtgggggcactgtccgccggcagcgagtggcctgccctgaagctggctgtcctgacggaggggcagctgacccgtgccctgtccggcaaggccaaaaggccccgcccacccaaacccgacagccgccagcggctgctgagctacgccgacctggaggtgggcgacctggtggtccacatccaccacggcatcggccgctttgccgggatgatccgcctgccggtggacggcgtggagaaggactacatcaagatacagtacgccggcagcgactgcctgtacgtccccgccacctcactggacctggtcagcaagtatatcggcggcggggatgacaccgaaaaggtgaagctcaacaagctctccggcgaccagtggaccaagaccacccgccgtgccaaggccgcggccaaggacctggccgacgggctcatcaagctgtacgcccagcgccaacgcttgggcggccacgccttttcaccggataccccctggcagcaggagtttgaggaggccttcgactatacggagaccgacgatcaactgaccgccatccgggagatcaaggccgatatggagaaacccgtgcccatggaccggctgctctgcggcgacgtgggctacggcaagacggaggtggccctccgcgccgccatgaagtgcatcctggacggcaagcaggtggcgctgctggtgcccaccaccgtgctggcgcagcagcactatgccaccgccgccgcccggtttcgggccttcccggtcacggtggaggtcctgtcccgcttccgcacccccaagcaggtcaaggatgtgctggaacgggtgaaggatggtcgtgtggacctgctcatcggcacccataagctgctgggcaagggtgtgcagttcaaggacctggggctgctcatcatcgatgaggagcagcgcttcggcgtcacgcacaaggagcgtctgcgtcaggtggcccggcaggtggacaccctgaccctctctgctacgccgattccccggacgctgaacatggccatgtccggcatccgcgacatgagcaccatcgagcagccgccccaggaccgccagagcgtccagacctatgtgctggagcatgactggggccttctggcggatgccatccgccgggagctgggccggggcggacaggtgtattacctgcataaccgggtagacagcatcgatgccaccgccgcccgtctccgtgacctgctgggcgaggacgttgccatcgagacagcccacggcaagatggccgagggtcagctcagcgacgtgatggcccgcatggccgagggtgagatcgacgtgctggtctgcaccaccattatcgagaccggcatcgatatccccaatgtaaacacgctgatcatcgaggacgcggacaacatggggttgagccagctgcaccagctgaggggccgcatcggccgcagtccccgccgggcctacgcctatctgacctaccgggccggcaaggtgctcaccgaggtggccgccaagcgtctgaccgccatccgcgagtatgtagagtttggctccggcttcaagatcgccatgcgcgacctggagatccgcggcgcgggcaatctgctgggcccggagcagtccggttacatgatgtccgtgggctatgatatgtacctgaagctgctgaacgacgcggtgctggagcagcagggcaagaccgcccccgcccgggtggagtgctccgctgacatcaccgtggcggcctatatcccggagtcttacgttcccgccgcccggcagcgcatggacctctaccgccgcatcgcggccctccgcacgccggaggacgagtccgagctcaccgacgagctgctggaccgctacggcgacgtgccgccgccggtgacggcgctgctgcaggtggcgctgctccgcgccgccgctatggactgcggcgtcaccgatatcacccagaagggccgccagctggtgttcagctttgacgatcgggtggatgccgccgcgctgctggcggtgtgcaccatggcggcctaccgcagccgcgcgcagctgtccgccggggcagcgccccgcctgacactgtatatgcagcccggggaggaaccgctggccgccgcgggcgcgctggtggaggccctgcggctccatcagacagatacacaacaaatgaacggggcgcagtcccctgaggaggcaaaacatgaagaataactggatccgttttctggcgggcgcgctggtgtccgtcatgctggtgggcgcgtttgccctcaccggcggcatgaagggcggtaagagcaccgagggcctgctgtatcaggccagcggccttcacccggacggcgagatgctggtcgtcgacggtcagatcgtcacctgtgaggagtacctctattgggtggactacgtctgtacctatctggcgagccagctgccggacgtggactggaacgccgccgtgtccgagggcggcattacctacggcgactatgtaaagctggaggcggtgaacgccgccaagcgctttgccgtcacccgcgcctgggcagagcaggagggcatcgccctcaccgacggagacatggccgccctggctctccagcggcagaagctggtgtccctttacggcgaggagggctatcagcagcagctggccctgatgggcatcagcgaggagaccttcgacggtatgctggccgcccaatacctgaacagcagcctgcaaacggcctatggccccggcggcagcctgtatgacgaggatgccgtccgcgcctacgcccaggagcagggctatgccagcgtctatgtgctgaccctcaccggcgaaaatgccgagaccatggccgccgatctgctggagcgctggcagaaggcggaggacaaggcggcggagtacgccgccatgtgcgaggagctgcagcaggaggctgtgggcgccgttaccctgaccgccgctgagggcgatcccctcagcgacgccatcatggcgctggagctggaggagctgaccgccgtcattgatccctacggcgatggctcctgctatgtgatcctgcgtaccgatctggacctgtccgtggctgcggacgcctatttccagcaggtccagagcgaccggctggccaacgcctccgtggtgtccaacgccaagctgtatagcagcctggacgtgggagccttctatgaccggatgacggagctccgcgcggagatgcaggccgccatggcggaggctggtggtcataccgccgatgatggccatgaccacagcgccgacgccggtaccgacacggcgggggaggacactgccgataccggagctgacgccgaaccggcggcatgaggatgcgtcatttcgtcaaaatgacgggaaaccgccatttgatatgctcgatttgacgattttttaacgaagttgcaatttgggattgactattgttaaatttgtgactatcattagggatagacaggcgcgagcctttgttgtatactatcttcaacatattttataggaggtaactttcatgaaagacctgtatgttgttaactgctgccgtaccgccatcggttcctttggcggctccctgaagaacacccctgccgccgaaatgggcgccgtggtggtcaaggaggctctgaagcgcgcaaacgtggctcccgagaatgtggatgagctgatgttcggctgcatcctgacctctgcccagggccagaatgtggcccgtcaggtctccatcaaggctggtatcccctattccgtccccgcctataccgtgggcatggtctgcggctccggcatgaagtccgtcatcgagggcgcccgttccatcctggccggcgacagcgacatcgtggtttgcggcggtaccgagaacatgagcgccgctccctttgcctccatggacgcccgctggggcgctcgtatgggcgacaagaagctggtggacaccatgatcaaggacggcctgtgggacgcctataacaactatcacatgggcaccactgccgagaatatcaacgacatctggggtatcacccgccgcgagcaggacgagttcgccgccgcctcccagcagaagactgaggccgcccaggccgccggcaggttcgatgacgagatcgtccccgtgatgatcaaggtcaagaaggaaatggttcccttcgccaaggatgagtatcccaaggccggtgtcaccgcggacagcatcgccaagctgaagggcgcgttccccgtgggccccgagtcccccaaccccgtggtggtcaacaccttcgagcccaccggctgccaggatgctcccgataagggcacccagcgcgttaccgccgccaacgcctccggcatcaacgacggcgctgccgccatcgtgctggcctccggcgaggctgtggccaagtacggtttgaagcccatggccaagctgatcggctggggccagggcggcgtggatcccaagatcatgggcgtcggccccgtggtcgcttcccgcaacgccatgaagaaggccggcgtcaccatcgacgacatcgacctgatcgaggccaacgaggcctttgccgcccagtccatcgccgtggcccgcgagctgcactttgacatgagcaaggtcaacgtcaacggcggcgccatcgctctgggccatcccgtaggcgcctccggcgcgcgtatcatcgtcaccctgctgcacgagatgcagaagcgtcccgaggccaagaagggcctggcgaccctgtgcatcggcggcggcatgggcaccgcggtggtcttcgagaagtgctgaactgaatgaaaaagaagcggctcttaagagccgcttctttttgtacaccggggaaaaacagggaggccgcgcagcggcctcccaaaatctttatttcttgatctcaccgttagcggcggcggtcaggtacgcgttgatgaacccatcgatatcgccgtccatcaccgcctggatgttgcccatctcatagccggtgcgggtatccttggccagagtgtagggcatgaacacataggaacggatctggctgccccactcgatcttcatctgcacgccctttaggtcgctgatcttctccgcgtgctgctgcagcttcagctccgccaacttagcccgcagcatcttcatggcattgtcccggttctggaactggctgcgctccgtctggcagaacaccacgatgcccgtgggcaggtgggtcagacgcacggcggaggacgtcttgttgatatgctggccgcctgcaccgctggaacggcaggcctgcatttcgatgtcctccggacggatctcgatctcgctgtcgtcgtccagctccggcatgacctccagcgcggcaaagctggtctgccgccgcgcgttggcgtcaaaggggctcacgcgcaccagccggtgcacgccgttctcgctcttcagatagccataggcgttctcgccctcgatgaggatagtggcggacttgatgcccgcctcgtcgccggcctcatagtccatcagctggtaggtgtacccgtggcgctcggcccagcgggtgtacatccggtacagcatctccgtccagtcctgggcctcggtgccgccggcgccggcgtggaaggtcagaatggcgttgttggcgtcgtattcaccgctgagcagcgccgccagccggcgctcgctgatctccttttccagcgtctcatatccgctgacgacctcctccagctggctggggtcgtcctcctcctgggccatctcgcacagggtcagggtgtcctcccattcactgaccagcttgtcgtgcttcttgatcttgttctccaggcgcttcacctgccggctcacctgctggctgcgctccagatcgttccagaagccttcctgctccgtctccttctgcagctcggccagctcctcacgggccttggggatacccagcgccttctccagctcgcccagggtgggctccagcgcctgcagtttctgtttatactcgtcgtactcgataacggccatatatcgtctctccttgtgcctgtaaatttccttagccttactattataccaaaaaacagccgtttgtaaagaggacaaaacaggcgtgcgcggagcgcacgcctgttttcacttactcagcttgaaatagtctcccgagcccgccaggttcgtgacctcggtcaacaccagaatgttgtcggcctccgccgccagctctgccatgctgccccggtagtaccgcaggtcgatcatggtgatggtctcatagtcgccggtgaggaacggtacgaaggaattggcgaaggagtccttcaccagcagcaagtgcttcccgttctcaatgccggtggtgatgacgcactggccgtagttgccgcccagaaacagctcatacttatccttctgctccagggcggacaggtcgtacagcgcgccgtctttcccgtcgcacaccacgctctccaccgtgatctccggcgcgtagtacacgctgtcgtatacgctgtccggcagcagcaccttggagtacagcgtgccgcggaagctgtccgtggccagcgtcaggtcatagctgcgggcggtgtgccccgtggcctgtgcccacagtgtataggccgcctgcgcgcccatggtggtccagtggtggtccgtgtggtagtagggatcgtccaccgccgatagcgtttcccggctgtccagcagcgtaccgcccagaatatcacccagccggccgaaggccttgtcctcgttgaaatacggcgcgttctccggcagcatatccctcagaattccggccgggctgggcacgatcagcgccgtgcagggcttgccgctggcggcaaagaaatcccggatatacccggcgttcttctccagccttacccagtcaaagctgtcatcggtcaccttggcaaagtacctcccgtccgcgcccagataggtgccgctgatgtcctccttgccctcggcccgctgcagcaccgaccgggcggcggtccagaagtcccggaagacgatctggtcgctggtatagtcctccacgtcctccatgaagtcgccggacatgatgcggtcccaggtgagtctgggcgtcagctgcaaatagcggttctcgttctccgagaatgcccggtccggcgtcaggaaaaagctgccgacagacagcgccagcagtatgccgccgatggcgatcagcggcgcgatgccgcttcgtttcttcatagcgccgcctccttaaaatctaaagtacaaaaacgggttgtagctgtcgcccaccaggaacgccatgctcaccagcagtacgacgactacccacaccgttcgcagtccgtccgacagggcgggggagagggcctgttcccgcttttcccacagccgcttgggaaggctcgtgcagccgatgacgcccaggaccagcagcagccagccgcaccgcagcaggtacgccgtggtgctgtcggcaaaggttccggagaacatatggcccacataggcccccagcgcgccgaggtctgtgatggcgaacagcacccagcccatgacgaagcagaagcaggtgtacacgtgccctacgaaccggggcgccttgtccagccacttcagcaggaacgtcttttccagcagcagcagtacggcgtagtatacgccccacagcacgaaattccagctggccccgtgccacaggccggtcagcagccagacgatggcaatgttcaggagctgccgacccttgcccttgcggttaccgcccagggggatgtagacgtactcccggaaccaggtggacaggctgatgtgccaccgccgccagaactcggtgacggaacgtgactcatagggatagttgaagttctccaggaaatggaacccgaagaaatgccccaggccgatggccatgtccgaatagccggagaagtcaaaatagatctggaacgtgtacgcgatggcgccgatccatgccgtgaccgctgtggggtccgacatggcggcgatgtcctcccagatggcgcccatctggttggcgatgagcaccttcttgcccagaccgatcaccagccgctgcagaccctcgctggcctcgctcaccgactcccgccggtgctccaggtcgtaggccaccgtcttgtactgcacgataggccccgcgatcaactgggggaacagcgttacatacgcgccgaagtccacgatgttccgctggggcggcaccagcccccggtacacgtcgatggtatagctcatggtctggaaggtgtagaaggagataccgatgggcagcagcagccccagcgccgggatggctgtgcccagcagaccgttcaggttgctgatggcaaaatccgtgtacttgaaaaagcccaggatcgccaggtttcccaccacagagatgaccagcaccgccttggcgccgccctcccttcccttgttccgaaagcggccgatggccagaccgttgcagtagtcgaacaccgtggagaacagcatgatcagaatgtacttcggctcaccccagccgtaaaacagcaggctgaagacaagcaacaacccgttccgcagcttccgtgggcagatatagtataaaatagccaccagcggcaaaaacgccaataaaaatgtggtgctgctgaataccatgtgatgtgctctcctttgcggatagtcagaaaaaggaacagggcgggcttgcccgccctgttcaaaacagatgtcacttcacgccggccagcttacccatctgatagctgccgcgtatggcggacaggttgttgacgaacaacacgtccgtcacgcccttggccttggccagtgcgctgacgctgccgccgtaataccggtagtccaccacatacaccgtctggtagtggtccaccagaaacggtacaaaggcgttgccgaaggactccttcaccacgatgcagctctgcccattgctgacttcgggattctcgatcacggtgaaggggttgtcgcccatgatgaacgcgccgtatttcaggctggccgctgcggtggactcgtcaaagatcaccttgccgccggtgagctcgctgtcctcgctgctgccgtacttcatggcggcggtgctgctgacgggatgataggcgttcaccgtatccggatcatccgccatggcctgaggcttgccgccgtcgttgtagaaggagcccaaaaagcccgtgtactggctcacctcatagtcgctgaggtcgtggggcgtaatgcccttgacgttgcagaactgtacataggcgtaataggcgcccagcgccgtccaatggtggtcggtgcggaaatagatgtactccgtccgatgggcgttcagcgcgtcatgcaggggcaccgtttttatattctgccccattcccgccagaatatccttttcggcctgtgcctgatcgctgccgggtatgtcgctgagcaggctgtccggcagggtaatgctgctggacagggggatcgccatggcgtagacattgctgacgccgctgaggctgtccgccacggcgttgaccgtggactggtacttctccgccagggagcccacatagttgtacatctcatatccggcattgcccacgatgtatacgccgccggactgataaggcgtggcgtcggtggtgatcacattggaggctgccggcttcgtggtggccacggcgggcttatcagtgctcccatcgccgttcccgctttgaccacccttttgatcgccctccgggtccttcgcggtgttgtccgcgtcgccggtcccgtcaggctcgccgtccgcgggctgggtgacggcagggctgtctgtatccttgtccggcgcctttttaccgctgaatacatcggtgaagatggccagcaccgccaccaccagcgccgcggcggcgatcagaagcagcagcgcgccgcctccgccccgctgccgccgttcataccgcggactcatcctacatactccttgatgaccgcattggcggtatccgtgtcagaggtaacgcacagcaccacgcaggtgccgtaagtggcgaaaacggcgttgttcaggcgctcggcctcctcgggctggtagcgcccggcctcctgcgtctggctgtccagcagctcctgcatggcgatcttcaccgccgatgcgtccgtcttatccttgcaggacaccacaaagatctcctccatggtgctgccgtcagacatataggcggcagcgctgctgccctcgggcagttccagatagtctccggcgtcgatagcgctcatggtgctgtcaaactgtacgcgctcggccagcgccttgcccagcccctcggcatccaccgtggcggaggacttgtcgccgcaggcggccagggacaggaccatcagcatggccagcagcagggtcataaaacgtttcatagaattgctccttatcattcactcaagactgttttgcccgccggtatatgagataccggctcaatacatcattataatacaaaccgcgcggaagtaaaagggggtaaatacaaacaagccatttattttccgccaaggctttcactacctatgacggagcgaccccgccgcgggttccgaaaaaaagagaccgcaaagcggtctctttttcaaaagtcaatggtcccgttcagtaccttcaggtcgtagggctcgaacaccaccctgcggtaggcatccacgtccatcttcacgcccgtccagtcgctgtgtatctcgccgttctgcttgatgaggatgtcgtacagaatgtcgtaggtcacgccgtccggccccttctcctcaatggtggagtagggcagcgtcttgtggtacgtcatgtgcaggcccttgtattcgaagtggaagccgttgcgcatccggcagccgtccagccccttgtaggtgaacaggcgcttcaggtcctgcaatatcttgtcgtgttcctcttcgtacaggttctccggtgtcgtctcggtgtagtcgtaccggaactggatggggatacggtagggcaggaagcgttccacatagtccaccagcttcgccgccggatagttcttgtacagcacgcagttgatgcgcgtggggcaggcgatcttccccagcacctggtcagggctttcctccacatagtgctgcaggtggcgggagatgttcatgcaggtgatcttgtctttgttcctctccgtaaaggccagcatttcctcgaaggaggtgtgggtctgggcggggaaggtggtgttgatatagatcttgtgggtggcggggatggcgtccagcatctgctgcagtgcgttcaggtcggccagcggctcgccgccggtgaacacaaaatcacaccggggagtgatgccgtccatcacccggatgcttgccagtatcttctccagactgaagccggagcagtccgcgtattcttttttgttgatgcagaaggggcagttgttctggcagtcgtagggtacgaacaccgtcacggtggcgccgccttcccgcgttttatagggatgggccatgttgttgacaacctcacatcaaaatgtaccaaaacattgtaaaacaaatagtgatggaaagcaagggaaatgttcaaaaatctattgttttcttcttaacaaagcgcctgcgctccgccgtcagtaggcgctgtccgccaattcggcgcgaatagcggcaaaggccgcctcctccccccgctccttcagcagcagcagccaccggtccagcagcgccgccgtctccggatgcatgaagcggctggcatccgtccgccgcaggtccttgctccgctggtagtagtcgtagggggaggcgtccgtatatgcgtcgccctgatagacccggcaggcggcgatccggtcgcagaacatctccgccacatactttttcggcattttgcatccgccgatatagatggtcccatcctcccggcggcagtagtcgatccagtactcaaagtggtggcggttgcgccccttgtggtgcagccacgccagactcacgccgttttccaggcgctcctggtcgttggggctgcgccagccctggtagtattttacgccccgccaaaactccgtgggactgtatttgctcaggtcgtgggtcagaccctgccacaccagacccagcttgaagcaatagtgccgcaccaggcgccggtgacggttgacggtatgtaaatgcgcgcggaatggcatggcggcacctcctgaaacaagctacctgacagtatagcacatccggcgcgaaaaggacaggggaaatttccgccggggcataagacggcgcaaagcgcggcagactacgcgggaggtgagacgtacatggtcgatatggcattttttcgcggcggactggggcgctggctgccgccgtccgtaccgccggtggacgaggcggtgctgctgcgccggtgctgggagctgttggtgctggaccggcccggcacggcgcggctggcggtgttgggacgcgcgccgctgtgccgcacggtgctgctgccccaggagaataccgccgcgcctctgcgggcgcagcaggtggtgggctgcggcctgtcgccccgatgcagcctgacgctgtccggcctgacgccccgcccggtgctgtgcgtgcagcggcggctgacggcggtgaacggcgcggccatcgagccgcaggatatccccctgcccctgcgctgggggcggcttccgccggaggcgctgctgctggccgccggcgcctggctgctggcggagggccgtctgccggactgaaaagcaagaggagcgcccacatgggcgctcctcttgctttctccccggtttcccctgtcggtgtcagcataaggtatccagtttttcggtgaacagcttgtcgttgatctggaacaaggtcatgctgtggctcagaccatagagaatgatggcgtcccgccggtcgcgggtgtacagcggcgcgtgccgcgcctgccgcagcaggtcctgggcgtcctccaccgatgcgcccaggccgaagcatacgcacagcaggcggttgcgggaggggaagcggcagccggagaacagctggtgcagatatacctcgctgataccggactgcttggccagcgcggccttggagaggccggtggtggtatagagccgctgcagcgtcagctgtagcggcgtgtcccggaaattttcattgttctccgacagaaagcggtccagattattgctgctcggcaaattcaaatatatgtgggtgtatttgaagtgatttcacaagaaaaactttcgcaaatatgttaatatttcacctgctatttaggacacctcgttttcttagtatcaaaatagtatcacagaaagcctgcgattgcaagggatctaggctttgcaagcccctgccaaaattggcctcaatttgaggccaatttcggctactgacctccgcccaaaattaaaggaggcgggcaagcacccctagggcttgcccgccttgataaccgcagggcaagaccgggcggggcggtcaatggcggcgcacttgtgcgccgttcatctcgaccattgacagccccgacagaggttgctgctccccgataaaattcgtatttgttactcgatactgaactcagcgaataggtaaaaaccatcgtctgtaccataagagccatcttctgtcgatggataaaagaacttaacgactctgtattctcccgccgaaagcgaaccatatatttcagaccaattgatattcaaatctctttctccttgaaaaatatatgtttcggtgtcagtagttctatcgccgatctcttttactggtgaccatttatcatcttcctttttttcaatagaaaaatcgtaattgatcccgccattgatatcaattcctgtgttatttgaaatgcgaactgtcaaacctgaaggagttacacttccctctacaactttcatcgtgacatccccaaaattgatatttttattctggacgcaacctgccatccatagtgcaagtacaaagcaaagtgataatacgagaatctttttcatttcatatacctccacaacaaatccatcatttttctccactacttttatatgatatttcggtttaccatttattttttagaacagcatatcataaacctataggaaaatctacttttttacctacctccccggtcaaaagtgcgccgtgttcgattgccacttttctctgcctgttcccgctgtttatcggcccgtactgccgcctgcgcctgctggcggcgtgccttgccgcggtactggccgctttggccgtctggctgtggccggccgccgaaacggagccgcagcgcccgaacagcgtagccgatccggccgctgcgaccgacccggccccggatccctatttggcggcctgccagacctactacaccggcgcggacggacgggagtaccatgtgttcacggctgtgacgccgtccatcgagggccgtaccgacccggtggggtatcgctcggagctgatcccggcgggcggaacggtggacttccccgccaccgtcatggtggaggacgccgtgacccaggactacgcagcggaggatttcgccgcgctgctggacagctgggacgtgtccgtcaccgcgccggagggcgtgagccgggtgaagctgtgggacgcggaggaggaaacaccggagtccccggcgctgctgtaccggcggctgcgtgcggatcccacctgcacccacaacgaggtggtctggacgctgcgcatgaagagcggcgacgtgctgcacctgaccatgaccgtggaatttgaggagcagcaggcgctgcgcatcacgccggaggacgcgccgctggaaacggcgcaggagctgcaggcgctgctggatcggctggcggaggagtacgacgcggacacgtccatcacggtggagctgccggacgtgacctatgacgcgccggtgtcggtgggctgcgcggtcacgctgaagggcagcggcaccacctttgccgcgccggtgacggtgacgcccctgagcgacacggagcggtgccacgcctacgtccgcttttcggaggtcagcttcgagggagacggaggcggaaccggcgtgaccgccagagcgcccacctatctggagaactgccgcgtaaccggctgggacgtgggcgcgctggccgtgaacggcggctgggtctatctccacggcgggtatatcggcggcaacggggtgggcgcgcggtacgactccgcgtacagcaactcctatacatataccatcaggcacatcgactttttgaacaacaccacggcgctggagcttctgtgcctgccgccgaactcctatgcggcgctggatgactgccgcttccggggcaacggaacggatgtatacaaccccggcggctaccgcatcgaggtgaacaacggcacggaggtcaccttgtgagaacgtaaaaaagaaccgcccgaaggcggttcttttttcgtgcgggaagggccgtttacaggttcttctcgtaggactcgatcatcttcttgaccatctggccgcccacggagccggcctcgcggctggtcaggtgaccgttgtaaccgttcttcaggttcacgccgacctcagaggcggcctccatcttgaactgatccatagcggccttggcctcggggacattcagcttgttgctgttcttggtagacatagttgtgttctcctttcatgttgtggggcaaatgcccttgttgggtatcgcaacggtagttttgccgcgcgacagcgcgatatgcatgaaaaacagtggcaaatgctggatgcggcgcgcaaaaaggatagacaaacgggcgtattcatggtatactaaattcacttaacagcgagggggaccttctttcaggaaggaccgagcagggaggaagaggaaaaagcgcggcagctgccgcgctttttcgcgtccttcgccggacaaaaaagagggagatgacaacaccatctccctctccgctatgtaaaaaataagtcggagcaagcatacaaacctgctccgacgtggtccgagtgtcgagattcgaactcgaggcctcttgaaccccattcaagcgcgataccaaacttcgccacacccggatattctgttgtgcctcaaacagcccacttagaataccacagttttcggcggtttgcaagtcctattttgaatttttttcaaatttcttccgaggctttttgttgacaaaggcgtcggcgcatggtaatataatactcgcgtttggcacgagagacgcttttacgcacggagagatggctgagtggtcgaaagcaccggtcttgaaaaccggcgatgtgaaagcatccgtgggttcgaatcccactctctccgccagaaaataaatatgtatgcggaagtacccaagtggccgaaggggctcccctgctaagggagtaggccgtcaaaagcggcgcgagggttcaaatccctccttccgcgccagcaaaaagagacatccgaaaggatgtctctttttgcttcacgcggctgattttgcccttcccccgtgaaaccacccgttgacaaaccgcgccgaacggtttatacttattgccatcaaaaaggcagtgacgaagaagaagctgtttttccgcggccaaagagaggggcgcccccggctgaaagcaccccgccaaggacacggcccgtaccacttccgagccgcctgcgacgagcaggacgggtatcgcccgttacagcgatcgaaagcgacggcgtatgccggatctcttccgccgatactgcgttgcagaagcttgaaatacagaccgtattcctgcgctcctgcgccttgtctcgacgaaagatatcccgccatccgcagcggacagtaaaaatgctgcgcaggccgtaagcagggtggaaccgtggagtaatgcctattacctcacccctgataccattcaggggtggggatttttatttatccagccccgatcacaaggaggaacagactatgagcgaagtcaacaaggaatttacgtttgaaaacgaacagtaccgcaagacctactggcacacctgctcccacatcctggcccaggctgtcaagcgcctgcacccggaggtgaagctggccatcggccccagcatcgacaacggcttttattacgatctggacgcgcctttcgccttcacccaggacgacctgggcgagatcgaggctgaaatgcgtaagatctgtaaagagaagctgaagctggagcgcttcgagctgccccgcgccgaggctgtcaagtacatggaggaaaaggaagagccctacaaggtggaactcatcaacgacctgcccgaggatgcccacatctccttctacaagcagggcgagttcgtggacctgtgcgccggtccccatgtggactccaccggccgcatcaagggcaacggcatcaagctgaccgcctgcaacgccgcttactggcgcggcgactccaaccggcagaccctgcagcgtatctacggcgtggccttccccagcaaggacgagctggaagcctatctgaaggagcgggaggaggccgtgaagcgcgaccacaataagctgggacgcgagctggaatatttcaccactgtggactgcattggccagggcttgcccatcctgctgcccaagggtgcccgcgttatccagctgctgcagcgctgggtggaggacaccgagcagcagcgtggctatctgctgaccaagacgcccctgatggccaagcgtgagctgtacaagatctccggtcactgggatcattatctggacggcatgttcgtcatgggcgatcccgccgatgagacgaaggagtgctttgccctgcgtcccatgacctgcccgttccagtatcaggtgttcctgaaccgcggccgcagctaccgcgacctgcccatgcgtctgggcgagacatccaccctgttccgcaacgaggactccggtgagatgcacggcctgatccgcgtccgccagttcaccatctccgagggacatctggtgctgcgccccgaccagctggaggaggagttcaagcagtgcctggatctggccaagtactgcctgggcaccgtgggcctgttggaaaagtgcacgttccgcttctcccagtgggaccccgccaaccccaacaacaagtacgagggcacggcggagcagtgggaccacgcccaggccgccatggagcgcatcctgaaggatctgaacgtggactacaccgtgggcatcgacgaggccgcgttctacggccccaagctggacatccagtacaagaatgtgtacggcaaggaggatacccttgtcaccatccagatcgatatgctgctggcggagcgcttcggcatgtactatatcgatgagaacggcaacaaggccctgccctatatcatccaccgcacgtctctgggctgctatgagcggacgctggcctacctgatcgaggagtacgccggtgcgctgcccacctggatgatgcccgagcaggtacgcttcctgcctattactgaccgcgctgccgactactgcgtgcagcaggccgcggagctgcgcaagcagggcttccgcgtggaggtggacagccgcaacgagaagatcggcaagaagatccgcgaggctaccctggagaagatccccttcatgctggtggttggcgaccgcgacatggagaacggcaccgtctccgtccgtacccgcaagggcgaggatctgggcgccatgacgctggaggacttctccgccaagctgcgccagatcgtggatgagaagcagaagatctgacgagtgccataagttataaggtaagcgagagagacaggcagaagcctgtctcttttgctgcagtcagacaaaaaacagatttcgccaaaagaaaagtttattatagcaaaacagcaggcttctgacagaaaaccgcatgaaaaatacatgaaaatgatgcaaatgcgccaaaaaataggggaaagtgtatggatgaaaaacaaggaaatgcgctattgaacaccattcagagacacaaatatgttgacagagtgtgaacttatctggtaaaatcaaatgggtgcgcagcacccgaatgcatagaagtgaacggggcgcgccctgttcgctgtttccttctggcggaggaaacaacaaactatggtaaaggaattaggaggtaaacatgaaaaaagtagtttctctgctgctggctctcatcatggcgttctccctggtcgcctgcggcgaaaagaagggcgagaccgatgacaacaccgacaccgtgccctacaagatcggcatcgtgaccggctccgtctctcagtccgaggatgatcgccgcggcgccgaggccttccagaaggagtatggcgaggatatggtccagctggccatctatcccgacaacttcaccgaggagaccgagaccaccatccagagcatcgtgaacctgtccgccgaccccctgatgaaggccatcattgtcaatcaggctgtccccggcaccaccgaggctttccgcaagatcaaagagactcgccccgacatcatctgcatcgcaggtgagtcacacgaggatctgcccgagatcggctccgctgccgacctggtcaccaacaatgacttcgtctcccgcggctacctgatcatccgcaccgcgcacgagctgggctgcgataccttcgtacatatctccttcccccgccacatgtcctacgagaccatgagccgccgcgtggccatcatgcaggccgcctgcgaggagttcggcatgaagttcgtcctggagacggctcccgatcccacctctgacgtgggcgtttccggcgctcaggcctacattctggagcaggtgcccgcttgggtcgagaagtacggccagaacgctgcctacttctgcaccaacgatgcgcacaccgagcctctgctgaagcgcctgctggagtgcggcggctacttcatcgaggccgacctgccctcccccctgatgggctatcccggcgcgctgggtattgatctgaccaaggaagccggtgatttcgagaagatcctgaccaaggtcgagtccgccatcgtggagaagggcggcgccgatcacttcggcacctgggcttactcctacggctacaccctgtccgccggtcttgctctgcacgccaagaacgtgctggacggcaagagcgagctgaaggacatggacgatgtggctgccgcgctgcaggtctactctcccaaggcggcctggaacggcgccagctacaccaacgccaccaccggcgcgaagtctgaaaacgtgttcctgatctatcaggatacctatatcatgggcgatcccggccacttcatgggcaatgccgacgtggagatcccggagaagtactttaccatcagctgacgacaggcttttgaagcaaccattaaagcggggagggagggcatcctccctccccgctgctataggtagggatgaatatggaaaagaacaatgctccgctgcttgagatgcggaatatcaaaaagggctttttcggcaatcaggtgctcacagacatcaacttcaccttgaaagagggcgaggtgctggggctggtgggcgaaaacggcgccggaaagagcaccttgatgaaaatactgtttggcatggacgtgatccgtgagacgggcggctacgagggggatgtcctgatcgacggagaaaaagtgcagttcaacaccccctttgatgcgctgaaggccggcatcggcatggtgcatcaggagttctcgctgatccccggctttactgccacggagaacatcctcctcaaccgcgagcccaagaaaaaaagcgtcatttcagaagtgttcggcccgcgcctggacactctcgactataaggaaatggataaccgcgccgcaaaagccattgagaagatgggcgtggctatcgaccagaagatggtcatcagcagcatgcccgtggggcacaagcagtttacggagatcgcccgcgagctgagcaaggagaacctgaagctgctgatcctggacgagcccaccgccgtgctcaccgagcaggaggcgcaggcgctgttggactccatccgcggcatggcctcccggggcatcgccgtgatcttcatcacccaccgcctgcaggagatcctgtcggtgtgcgataaggtggtcatcatgcgggatggctacgttgtcaaggacgtggctgcccgcgagacggatgtccgcgacatcacccactacatggtggggcgcgaggtggctgccggcggcgctgcccacgacatccgcgaccactccgatgcccgcaccattctgtccatccgcaagctgtgggtggatatgcccggcgagatcgtccgcaacgtggatctggacgtgaaggagggcgagatcctgggcatcggcggtctggccggccagggcaagctgggtattcccaacggtgtgatgggcctgtacgaggcgggcggcaccgtggagttcgatggcaagcctatcgcgctgaacagcccccggaagtgcctggactcccagctggccttcgtgtccgaggatcggcgcggcgtgggtctgctgctggacgagtcgctggagtggaacgtggcgttccccgccatgcaggtgcagaacaagttcctgaagagaatgggtttcttcacatggcgcgacgaaaaggccatccacacggtgacgaaccggtatatcgatgaattgcagatcaagtgtaccggctccgcccagaaggccagagagctgtccggcggcaaccagcagaaggtgtgtctggccaaggcgttcgcgctggagccccgcttcctcttcgtgtccgagcctacccgcggcatcgacgtgggcgccaaggcgctggtgctggaggcgctgaagaaatttaaccgcgaatccggcgtcacggtggtgatgatctcctccgagctggaggagctgcgccagatctgcgaccgcatcgccatcgtctccggcggcagggtcgccggtatcctgcctgctgaccattcctccgaggagttcggtatgctcatggtcagtcaggtgaagtaaggaggaagaaatgggcaatacgaccacacttggaaacaagtcaaaattcagagagttggtggacagcttcggcctgccgcgtctgatcatcgcgtgcttcctgctgctgctgctcatcgccgcgccctgcgtggggctggatttccccacacagatcaccaatatcatcacccgtttcagctggaacgccgtgatggtgctggccatggtgcccatggtacactccggctgcggcctgaacttcggcctgccgctgggtatcgtgtccggactgctgggtgccacgctgtccatcgagctgggctatacggggtttgccagcttcctgatggccatcctcatcgccacgccctttgccctgctgttcggcggcggctacggctggctgctgaacaagatcaagggcggcgagatgatgatcgccacctatgtgggcttctcgtccgtgtccttcatgtgcatgatgtggctgctgctgccgtataagcatcccaccatggtgtggggcttctccgccagcggtctgcgtaccgtcatttcgttggagggctattatgacaaggcgctggccaacattctgaccatcgacctgaactgcatcggcatcaatctggtgatccccaccggtacgctgctgttcttcgtgctgctggccgtgctgatgtgggcgttcctgcacaccaagaccggcaccgccatgaccgctgtgggctccaaccccgcctttgcccgcgcagcgggcatcaacgtggacaagatgcggcttatctccgtgatcatgtccacctggctgggtgctgtgggtattctggtgtatgagcagggcttcggcttcatacagctgtacaacggccccttctggatggccatgcccgccgtggccgccatcctgatcggcggcgcgtcggtgaataaggcatccatcggcaatgtgattatcggtacgatcctgtatcagggcgtggtgaccatgacccccaccgtgatgagcgccgccttccagatggatatgagcgaggtcatccgtatcgtggtatccaacggcatgatcctctatgccctgaccagaaagacggaaagggggcgctgacatgaagggtaagagattcgacgtaaagcaattcctgggcaaaaactcagtgcccgtcctgtttatcatcatctgcgccgtgctcattcccgtgtccggcctgccggtgagctacatacttaacgaggctatgacccgtctggggcgcaacgcctttttgatcctgagcctgctgatccccattatggccggtatgggtctgaactttgccatgacgctgggcgctatggccggcgagatcgcgctgatcctggtggcggactggcagatctggggtatcccaggtctggtgctggcggccatcctgtccatccccctgtccattctgctgggtcttatgtgcggcagcatcctgaaccgcgccaagggccgcgagatggtcaccagctactttatcgcctattgcatgaccggtgtgtaccagctggtggtgctgtatatgatggggcccatcatccccatcctccacaacacactgaagctgccccgcggctttggtatccgcaacacagtcagccttctgcagatgcggcagagcatcgataatgcgctggccatctacgtgggcggcgtgaagatccccgtgctgacgctgatcatcatcgcattggcctgcctgttcatcgtgtggttccgccgcacgaagctgggacaggacatgcgcgcggtgggacaggacatgaacgtggcgcgggacgccggtatcaacgtggaccgcacccgcctgatctccatcgtcatgtccaccgtgttcgcgggcttcggcatgatcatctacctgcagaacatgggcaacttccccacctatacggcgcataccaacgtcggtatgttctgcatcgccgcgctgctggtgggcggcgcctccgtggaaaaggcgtccatcggcaacgtgttcctgggtgtgctcctgttccataccatgttcatcgtggcgccggccgccggaaccaagatcaccggcgactccatgatcggcgagtacttccgcgtgttcgtgtcctacgccgttatcaccgtggcactggtcatgtacgaggccaagaagcgcaaggagaaccgcacgctgggtcagcagctggccattgagcagaaggccgaggaggaggggagaaccgcatgaaaacgacgaaacgctcgtggctcatccgtatcgcctttatcctggtgctggtgctcgtcgccgtgctgatgctgcgcatcggccgcggccacaccgtctatttcgacaaccgcgcagtggacaagggcggccagtctgtggaggcaccctataagatcactgtgtacgtgaacggcgagcagatctccaagctgtacgaaaaggagcgctgcttgaccaccgtcatcggcgacaagctggagctgaccgtggaggtcatgcagcagaagggcggcagcgagacaacggaaacgtaccaaatgacactgccccataacatcgacggcatcatcatcaacctgccggcgtatatggctggcctgccggaggaggcctatctggaggaattcatccccgcgcctcccaccgaggaggacgacgaggaagcgcccaacaccgaggacgatatgggcctgggcgacttctgataatgtgtgctgcatacacagcccatgcgaaagcatgggctgtgggcacatagggacttgcttgcgctcggcaggcggatatgctatactgaatgggcggcgcggagaccgcggccgcatgggaaaggagtatcaaaatggctgttttgaaaggcttgaagccagaaaaggtgttcacatattttgaaaagctgtgctcggtgccccacggcagcggcaacacgaagatcatcagcgatctgtgcgtggactttgccaaggaactgggactgaagtaccggcaggagccgtgcaacaacgtggtgatctggcagccggcgtcccccggctgcgagagcgccgagccgatcatcctgcagggccacatcgacatggtgtgcgccaagaccgacgactgcaccaaggacatgacccgcgagggacttgacctgatgaccgacggggagtgggtctgggcggacaagacgtcgctgggcggcgacaactgcattgccgtggccatgatcctggcgatcctgtcggatgatacgctggtgcatccgcccatcgaggcggtgttcaccgtggacgaggaggtgggcatggacggcgcctttgcgctggactgctctgacctgaagggcaaaaaactgctgaatttggactccgagctggagggcgtgttcaccgtgtcctgcgcaggcggcatgcgctccgattgcctgctgcccgcagcgctgaccgatgcggcgggcatggagggcttcggcatcaccgtggccggcttgcggggcggtcactccggtgcggacatccatctgggacgcggcagcggcaaccgcctcatgggacgggtactggccacagcgctggagaagttccccggcctgcggctggcggccttctccggcgggcagttcgacaacgtgatctgctcccgctgcgatgcggcggtggcgctgcccaagggcagcggccgggcgttcgaagcgtttattcgggagcttgagggggtgctgaagaacgagtacgccgtcaccgaccccgatgtgacgctgacctgcgcggcagcggagacggcaaaagccgtgtccgcagagcgcaccgtgacgctggtgcaggcgctgacggccatgccgcatggcgtggaggctatggacacggatttccccggtctggtgcagacctccctgaatatgggcgtggtgaagctgggcggcgacggactgcacatcgcgttctccatccggtcgtccatcgcgtcccggaagctgatgctggcgcagcgcgtgcgggctgtggcggcgctggcgggcggcactgtggcagagcggggcgtgtaccccggctggcagtacaagagggagtcgcagttccgggatacgctgctggcggcgtataaggatcttaccggtaaggacggcgtggtggaggccacccacggcggtctggagtgcggattgctgatggagaagatccccggtctggacgcggtgtccatggggccggagctgcacgatgtacactccgtgcgggagcggctaagcgtgccctccacggagcgcacctatgaactggtatgcgagctgctgcggcgcagctgttgaatgtgacagaaagctgagaggcggggctttgccccgcctctgttattttgcaggattgcccggcagaaaatgcacttcttgcggggcgttcctgcataaaacaatttagcattatgaatagaccaccgctaaaaagtaccatgatacagacaaaactacggatttgccgaaagaaatgctgactaagaaaagcggaacgtccgcacggacgagaaaatcgttccgcagaaaaatgaaattttccgcatttagatattgcaaaaagtttacgcctgcgatataatggcaccgttgaacaccgccgcgcccgaccggccggcggaaaaagctgtttttcaggaagaggaaaacaatttatctatcaataaggagaaagaacatgaaaaagttttttgcactggttctggcgctggtcatggcgctgagcctggtcgcctgcggcgacaagaaggatgacagcggcgatgtgaccgctgagcataccgacaccaccaccgtggccgtgggcgcggtgatcctggcccgcgacgacgtgtccagcgatgacgtgtacaagttcgtggcggacatcttcgacaacgccgcgtccctgaccaccagccacgccaagtacggcgagctgagcctggagtacggcgcttccatcacctccgtgccctatcaccccggcgctgccaagtacttctccgagaagggctttgaggtcgcatccgtcaaggacggcgccggcaacaccgactcccgcaacctgcgcttcgtcaccggcggcgagtccggcacctactacgccttcggctccgtcatcgcccagcacgccaccaacaacgcgggcatcaacgtggtcggtctggtgggcaacggctctcaggccaacgtgcaggagttggtggacggcaccgctgacttcgcgttctgccagtccgacgtgatggcctacgcctacaacggtaccaacctgttcgagagcaaggtcgagggcttctccaccgtggccgccctgtacatggagcaggtgcagatcgtcaccaccaacgccagcatcaagaccgtggctgacctggccggcaagtccgtgtccatcggcgctcccggttccggcgtgtacttcaacgccattgacgtcctgggtgcttacgggctgaccgaggacgacatcaagcccacctaccagtccttcagcgacagcgccgacgccctgaagaacggccagatcgacgccgccttcatcgtggccggtgcccccaccaccgctgtgaccgacctggccaccaccaaggatacctacctggtcagcctggacagcgagcacatcgccaagctgctggagacctccgactattacaccgagaccgtcatcgccaaggacgtgtacttcggcgactaaatccttagcagagaattgacgcttttcgaggctacggcggggtttcccgccgtagtcctcgcgctattctgtaatcttcagggagagaaacgactatgagcatcgacaagaaaaaaccggataccagcccggccgacggcgtcaataccgccgcggacgaggccccggatctggacgcggtcatgcgtaaatatgaccgtgaatccgccacccgcctgtgggagggtacgccccagctgatcatccgcatcctcatggccgcgttcggtctgttctgcatcggcatgaccctgttttccaaggccatgcccgagatccggctcaccatgttcgtgggctgcatcattatcatcggcttcctgacctaccccgccagcaagcaccacgtcagggtcaactacctgccctggtacgatatcgtgctgatggtggtgggcgcggcctgcttcttctacttcgcgctgaacgccatgacgctggtgcgcctgtccacccgtatcgagacggtccacgtcatcatcggcgtggtgggtatcctgatcctgatggagctgtgccgccgctgcgtgggtctgcctattctgtgcgtggccggcgtgctgatcgtgtacgcgttcatcaaccagctgagctacgccggcgcggtgaacggtaccaccctgtatgacgcgctgaaaaccatcatctacaagctgttctacaccacctccggcgtcatcggcacgcccatcaacgtgtgctatacctacatcgttctgttcatcatcttcggcgcgttcctggagcgcaccggcatcgccaacttcttcatcagctttgccaaccgtctggctggctggtccagcggcggcccggcgaaggtggctgttatcagctccgccctgtgcggcatggtgtccggctcctccgtgggcaacaccgtcaccaccggttccttcaccatccccatgatgaagaagaccggctacaagcccgagttcgccggcgccgtcgaggccgcggcctccaccggcggccagatcatgccccccatcatgggtgcggcggccttcctcatggccgagtacatgaagctgccctacgcccaggtggccgtcaaggccatcctgcccgcgctgctgtacttcaccgggatcttcatcgccgtccatctggaggccaagaagctgggcctgaagggcgttccccgcgaggagctgcctgcgtggcgtctgctggtccgtgactgctacctgatcattcccctgatcctgctggtgtggctggtgtcctccggcagcaagaccatgtcccactccgcggcctattccattctggccgccattgccgtgggcttcgtcaatttcttcctgcagggcaagcgcggtgagggcgacacccagcccatgacgaccggcaaggcgctgggtaatgccggcaagcgctccttcttctccgcggtggagtctctggaagccggttcccgcggcgctatcaccgtggccgtggcctgcagcatggcgggcatcatcgccggctgtatcaccgtcaccggcctggcctccatcctcatcaacgccatcgtccagctggcgggcaacgccaccatcgtcggcctggtgctgaccatgctgtgctgtatcgtcctgggcatgggcgtgcccaccacggccaactactgcatcatggcctccacctgcgcgcccatcctcattcagctgggcttcccgctggtggccgcccacttcttcgtgttctacttcggcatcgtggcggatatcacgccccctgtggctctggcggcctacgccggctcggccatcgccaagtccgaccccatgaagaccggcatcaacgccaccaagctggccatcgccgcctttatcgtgccgtacatcttcgcctacagtccggcgctgctgtttgaaaacatctccggctggtgggaggtggcgcagatctgcgtcagtgccctgttgggcatctttgccatcgcggcgtccctgaacggccatctgtataagaaggtccactgggtgctgcgtatcgtcctggccgtcggcggcctgggcatgatgatccccggcacgctcaccgacgtggtcggcctggtgctggtggcggcggtcatcgcctaccagaagatcagcgccaagaagcacggcggccccgtggtgacggcctgaccccatttgaagcaaaagcatccccgcacaccgtgcggggatgcttttttacactatgttcatacatttccacacattttgcctaaagtgcatagtacgggcatcttgcaaaaactgtctgaattcggtatgatacaggcggtaaggcagtttttgcacaaagagaggagcatggacatggcacagaccacaaaaaacgccattcgcaagggctttctggacctgctggagcagcggccgctggataagatctccgtggtggacatcgcagatcactgcggcgtgaaccggaatacgttttattactactactgcgacatctacgccctggtgcgcgaggtgctggagacggagctggaccgcgtcctcaacgcaccacccctctgcaccagctggtaccaactgatgatgcgggtggcggcgttcatgcgcgccaaccgccgcgcggtctaccacctgtaccagtccagccagcgcgacctgctggagcgcgagtattaccaggtggtctacggtgccgtggaggatctggtgcgccgcacggcggaggacctgccggtggcggagacggatgtgcagtccatcgcggcgctgtatacggccacgctggtgggcctgctgcaaagctggctgcactacggcatgaagcacgatgaggaacagttcgtggagcgcgtcacccgcctgacggagggcacgctgcgctacgcgctggagcgcagctgcgggggggagaaggcgtgagcggcttctggaaatgcgtcctgtacgcggcggcgctggccctgctggcgcacccgctgggtcaggcgatccccggtccctttgacccggagaagcggcccttccgcagccggaaatgggagcagaacggccgcatctacaccaaattggccatcgataagtggaagaagctggtgccggacatgagccgcatcctgccggacatggtgaagaaggaactgcccggcagcggcgccgtgacggcggatcaggccgcggcgctggtgcaggagacgtgccgcgcggagctggtccacggggcctcctgtttgctgggcctggcgtttctgtggctgtggcccggctggggcggcgcgatcgtgctggcggtgtgggtgctgctggccaatctgccctttattctgatacaacgctacaaccgcccccggctcatgcgcctggcggcgctgctgcgaaagcgagcgcagcggaaaggagagcaaaatgcgcgtactgatcctgacctgtaacaccggcggcgggcacaacgccgtagccgccgccctgcgtgacagcctccaacgctgcggcgcgtcctgcgacgtgatggacggcttgggcttcatctccaaaaaggcctccaaattcgtttccaagtggcacacccggttctaccgccggtatcccaagctctacaaggcgggctatatgtccgccgagggcgacaaggagatggaccggcgcgacggcccggtgtaccgctatattgcccgcggtgctcgccgtctgggccgcacgctgcaaagcggcggctacgatgccgttgtctgcgtccacgtgatccccgccatgatgatgacggcgctgaagcaggcgtggagcgcctgcccggtgttctgcttcgtggccacggactatacctgcagccccacggtaggtgcctgcaccccggatatctgcgtcattccccatcaggagctggccgacgagttcgtcagctgcggcatcgcccgcgatacccttctgcccgccggcattcccgtgcgttccgccttccgcgagcatggcgatagagccgcggcgcggagagctctgggcctgccggagaccggccgccacatcgtcctcatgtccggcagcatcggctgcggccccatgggcgacgtggcggaggacctggatatgcgtatggccgacggcgactttgccacggtgctgtgcggcagcaacaagcagatgcgctatgccctggagctgcgccgcctgtaccgcgtggaggctgtgggctttaccacccaggtgcagctgtacatggacagcgcggacgtgctggtcagcaagcccggcggcatcagcatcaccgaggccggcacccgcggcgtgccgctgctgctggcggatatggtgggcggctgcgaaacgcggaacgaggcgttcttcaccgcccacggctgggcggcctcctgcccgccggacaacatggccgcgtcggccctggcctttctggaggacaaacagcagcgtcaggccatcaccgctgcccagagccgcgatttcgacggcctggccgccgaccgtgtggccgccgccgtcctcgcccgctgcaggaaatgaccccagcgcccacggcggcagccgtgggcgccttctttgcgctttttgtacggcgtccctcttgcatttcgcgcaaactgtcggtatacttgttaaagaaatatcgatttgttcacaggcaggtcatattcgtatagtaggatgaaactgcggccccggacgtgggctgcggccgaaaggagggcgtctgcccatgatgatcgaaaaaagcggtaccatccgcctgcgggacattcccaccgccgcgggcctttccccgaaggagcaggagctggcggcgggcatggtgcgggtgacgcacctgtaccgcagtgcgctgaaggtagccgtaacgcagatggagatcctggacgaggagttcgcccgtctgtatgaccactcgcccatccaccacatcgaataccgtatcaagacgctggacagcatcatcgacaagctgcgccgccggggcctggaggtcagcatcgacaacatctacgcccacatccaggacgtggccggtatccgcgtcatctgcaactatctggacgatatctactacctgcgctccctgctcacccgcagcgagtcctataccgtcctccgcgaggtggactatatcaaggagcccaaggacaccggctaccgcagcctgcacctgatcgtcaacgtgcccatcgtcatcagcgagggcaccatggtcctgccggtggagatccagctccgcaccatcgccatggatatgtgggccagtctggagcacgagctgcggtataaatccgaccgcaaattcacccagcaggatgccgcccgcctgcgcctgtgctccgacgccatcagcgagatcgaccgggagatgcaggatatctaccagggcaacgaaccccaataccacgcctgaacacaaaagaccggccccgccggtcttttttcgtcccccgccaaggcccataacttccccttatacctcccacacagattttttatgccaacatctggatattcccgttgcctttcgcgacactttctggtaagatggtcgtacaacagagcctgcacgcaaaaaaactttcccaacaagaaattttgcggcacacaggcccgggagagaaatatgtgagccatagaaggaggaaccgccatgaagagacgactgctccccatcctgatgaccctggtattggtatgcgcgctgcccatatgggcagcttttgttacatcgggggatgtaacaaatcccctggtgtgcaccgccggcgcgacggaactgaccttgcaggggaggatagacaaggcaaacgctggcgatacgattacattgagctctgatacggagattgctgccacgctgcaaattgcaaaaaacctgaccctcgacctgaacggctgtgtattgaggatgagaggcaccggcagtgtgctcgaggtgagtgaccgtgcgaccctgaccatcacggacagcagcgcggcgaagtccggcaccatcaccggcggtaatgccgaggatggcggcggcgtatacataggagacaattcatcagaaggacaccttgtgatgaccggcggcaccatcaccggctgtgcgaccgaccacggccggggcggcggtgtgtttgtatttaaggggagctttaccatgtccggtacggccaagatcaccaactgcaccgctgtttggggtggcggcgttgtggtacataccggatcgagcacattcactatgaacggcggtgagatcagcgattgcaaagcttcctataccggcggtggtgtttgcctggtcggcggtgcatggtttgaaatgaccggcggtaccatccggaactgcacagctggctctgtggagagcagtgcgatctatatggacccggggacgatgaaagcccacggcggcacggtaaaggggaatgtctgcgtgagtggggtcggtaactgtgttattacgcatgaaccttcccaagagggctataccatttttgacgagacgatcacatttgagggtaatggcagtactacggccatgtacccggtgaaatttgacttggaccagggcagtgacaatgacattacggtgagagagacgaagctgggctccccggcagaaaagcccgctgacccgaccaaaccaaatcttgttttccaatattggtacgaagcgggaacggatggctctgccgcatggaacttcagtacgccggtgacgcgtcccctgcatctgctggccaagtgggaggaaaaaccccaaaccggcggctactactacgccccgcccgcggagcagcccatcgaggcccccaagaccgccgaccccggcgtagccctctacgccgccctgtcgctcctgtctctgacgggcctgacctgcgccaccaaaaagagataaacaaacaaaaagagataaacaaagccaaaagaagcgcccccggttgaaaaaagccttcccctcgaggggaaggtggcacggcgaagccgtgacggatgaggtgtagccgcgcagcggcgtaaaactccccgtcccgcccgtaggcggcgtcccccataccccggcggcatcagccgccaccaaccaaagccgccctccgggcggctttggcgcgatttgataatcgccactcgaccagcgcaccaacccctaccctcgcacagcgtcagcggcagcggcgcaagaggtacaagcagtcccctgaaccgacaatgttacccaccgcacttcatgcgcgagtgcataccgccaaatctgcatgacccacagcgcgccaaggggtccttagaccgtaggtctaagcgactttctttcccacatttctttcttcgcagaaagaaatgtggccgccggaggcttgcgcccgcaggcgcaacacctgcacattcccgcgccaaggaagtcttgaaacgtagtttcaagcggctttctttggtagctttctttcaacgatgaaagaaagctactcgcgccagggggcgcgaaactccccatcccggcacacaaaaaaacagccctccggccaccgccgaagggctgtttttcacagatgatattcctgcttgtactcctcatagtaccgcgcgaaggaactggacttcatggcccggacactgttcagatactcgtgggtgtcgaaggagtcggactccagctcgataatggccacggcgatgttggagcagtggtccgccacgcgctcgtagttggtcagcaggtcgttgaacacgaacccctggttcagcgtgcagctgccggactgcaatcggtccacgtggtgggacttcatctcgtcgcacaggccgtcgatgatctcctccagcggctccacccgggcggcccgctggggatcgttttccacaaaggcgcccacggcgatggatagtatctcccggacggcggactctatcacgtccagctcatgacaggcctcaggggagaattgcagatccttgtcgtgtatctccttggcggcctccgaaatgttcagtgcgtggtcggagatacgctcaaagtcggagatggtgtgcaggtatttgctgacctcctcgctctgggattgagacagggacttgctggtgatcttcatcagataggtgcccagcttgtcctcgtagcggtcgataacggactccgtttcacccaccatgcggaaatccttgtcggaccagcggttccgcaggccaacggccatcagcaggttgccctcggcccgttcggccatggagttggtcaccagccggctctgctcgatggacagcgccgggtgctgcaaaaagcgctcctccagccggtccatctcctgctcctcggcggcggagccgtcgtcggggaacagcagctccaccatgtgctccatcagcccaatgcagggcagcagcacgatcacggtggccaggcggaacagggtgttcatcagtgcgatggacacagaggacatgaccgcgtccaaaaaggtgaagtggataatggcgttggcgccgtagaacagcagcgcccagatcagcacgcccagcacgtcgatcagcagatagataaaggcggtgcgcttgccgttgaggttggcgcccagggcggacagcagcacaggcaccgccgcgccgatggcgatgcccatgacgatgggcagagccacctcaaaggtgacagcgccggtaatggccagcgcctgcaaaatacccaccgcggcggaggcgctctgcaaaacgctggtgaacgccagacccaccagaatacctaaaatggggttggagaagctggtcaggatgcggataaaggcctcgctctcccgcaggggggacaccgcgccggacatggcggacataccgtacatcagcaccgcgaagcccagcaggatctcgcccacatagcggttgctggtcttgccggtgaacatccgcaggatgatgccgaccacggccacgatgccggtgagcacctcggtgctcagcagctgcaccacgccgctgccgccctccagggaagacaggcacaggatccacccggtgacgctggtgcccagtatggcgcccatgatcacgccgatggcctgcttgaccttcatcatgccggagttgacgaagcccaccaccatcacagaggtggcggaggaggactggatcacggcggtgacgccggtgcccagcagcacgcccttcagcggtgtgctgctcagcttatagagcaccagctccaggcggctgccggcgacctttttcaggccctcgcccatcagggacataccgaacaaaaacagtgcgataccgcccagcagcgatatgacgtctgcaacgctcatggcccattccctcccatgataaaatcttcttataggtagtataacaggtacaggggggatttgtcgactgaaactgtaaaaaagccggtagaaattttaggtttttcttaaacagcccttgtggttcttgtcaaagagagcaccttcgggtataatgacagttacaaaaaaagcacagtaaggatacaataaggtatacaatgaagtaaagtgaaggaacgtatatgtttaagcattgtgtcatcgtttttttcgtctccatggtgccgttgatcgagctgcggggcgcgatcccctacggcgtggccttcggtctgcccctgtggctgacgtatctgatcgccatcgcgggcaatatgctgccggttcccatcatttatttttttgcacgaaaagtgcttgtatgggggagagataagaggtatatcggaaaatttttcaccttttgcctggaaaaaggggagaaagccgggcgtaagctccaggccaaagccggccgcggactgtactgggcgctgctgctgtttgtgggcattcccctgccgggcaccggcgcctggacgggcactcttgccgccagcctgctcgatatggacttcaaaaaaagcaccttcgcctgcgccgccggcgtcctgctggccggtgccatcatgggtggcttgagcctgttgggcgtcagtgctttcggcgggtaaatttgtcttgcaatcgccggccatttacggtataatgtgcgggtaatatctgccggtgtgatggaattggtagacgtagtggactcaaaatccaccgctggcgacagcgtaccggttcgagtccggtcaccggcaccaaaaaagagacatccgtgaggatgtctctttttttgccgctgatagaagggtatatacgaattttgcaaaaattaccaatatatcaataactgcttgatatttcgctataaaaatatataatagatacacgaaccagcagtggtaccactgctctttgtttcaatgcacaattgaaacaaagaggtctgtacaatggaaaaggaggagaaaatgaggaggataaggcgttagagcttcttgccgacctgaagaaagaggtgagggaacgcggtgtgatggtcaaggtcggcgttgttattttcaatcgggaggcaaatgttgcgttcccgcttacggagcttacaaaggaaaactatactaccattgaggctgcgataagggaaactatatccagcggcagcaatacgcatgcgggacttcttgcgggcaagaaaatgctcgatggcgatacggcggtcgagccgcaccgcaagcatctgatatttgtcagtgacggcgttacctatcagttctgcaagggggatgatcatactaccccgtatacgcgcagctttgatggcagcctaatctcgaatggtgttaaccagtgcggtacgctaagtgagttgaacgtgcagtacgggtacagtgacgaagaggcaggaacgtttattcccaagggctgcatcaatgactggatgagcgatattgccggaagaatggagacagacaatgacaacgaggattgggactatcaatatactgggcagactccgaccgaaaatagcaaactgctgcagaaaaaggaaaacgtttcaaatgtggagaaagccctgcatctgacagagagtacctacaaagcgatgcaggagagtggctatcagtgccatgccgtgttggcaagggaaacacggcagtggggtaccgcctttatgaacagactggcgggagggagagcagtcgcttttgactcaatccaacataaagtcctctacgctgttgataagggttccgctgtggcggatactgtcggcaagagtttcgatctcgttcccggcacgttttgtctcaccgttggcgggcaagaactgcaatataagcaggatggaaatgtgacctacttcggcggcgaccggaatgagagtaattaccgcttcaagatagagtacgacggtgccgccgacagcttcacatgggaaatcaacgaaccggtctccaactttgccccggtcaagctttcctacactgtaaagctcgccggtacgcccgccgccggcacccacggtgtgatggatctgaatggggacggttatgtggatgacaccaccacactcgtagacgtgtcaaaggcgctttataccaatgagagcgcgatcttgacaccggtagccacagtcggtgggcagggtgaggctctggagttccccaagccctccgtgtcctacacggcggccgcctattactacagcgagccccctgcacctgtgaaaaggacggtcagccccacgacctttgacgcgggaattgccgtatacgctgaggtcgccgccctgtcgctggccggcgcggtaaagctgtgcgggaggcgtggccgccgcgatgcctaagaggatatccctcccacggctgatgtcttccaccctgcaccggcaggggaatacagagagcaccccgaaaggggtgctctctgcgtccggcattaatttgctgtttatttacgattttccctctaccaaagcggtgcaagatgtggtatgatatttaagtaagagtatgacccggagggaggtgctgctgtatgcggcgttttaaacggtatatctgcctggtcgggctgctggcgctgctggcagcggcattgaccggctgcggtttctctgacgattcggtggaggaactgtttaccctgccgcgaatggcggaggagtacaccggcctgacacaggagctggaggcactgatcacacagggctatgagtacgcctcgcctaccggcgggcggaatatccagtcggtgcagatggctgacctggacggcgacggacagcaggaggccctggcctttttccgcatgagcagcgacgaaaagccgctgaaaatatttgtatttaagatcgagggcgacagctatgcccgctactgcaccatcgagagcagcggcaccgccatcgacagcgtgtactatcaggacctgaacggcgacggccggcgtgagctgatcgtgggctggcgtatcagcgccgaggtgcagaccgtggcggtgtacaccgtggcgcgggagccagtggcgctgatgtccagcggctacacgcgctttaccatacaggatctgaatggtgacggtatccccagcctgctggtgcttcgcaccgacgcggacagccagccggtggcggagttctacggctggcaggatgagcagatgggcgtggcctaccgctgcgtgctgtccagcaccatggcctcggtgaaccggggcagcctggtcagcgatcggctggatgccgacacgccggcgctgtacatcaccggtgtggacgagcagggtatggccgccacggatattctggtgttccgccaggatctggggctggtgaatctggcactcagcggcagcagcaccggcatgtccaacgccgtgtttccctatcgtcagctgctgccccaggatatcaacggcgacgggattatcgagctgcccagtccggacaccagttggacagcggagcagacggacggtctggtcagctggctttgctgcaacggcgacgggcagttgtccaccgtggccaagacgtaccacagcctgtcctgcgggtggtatttcaccataccggagagctggtgggactggagcgtggagaccgccaccaccagcatcagcaatgaaaatcagttcagcctggcaatcaacggggatccggtgctgagcctgtacaccatcaccggcgagaaccgggagaaccgcggccgcatggggaaaagggtgctgctgcgtcgccagacagccaccatctacgccggcgagctgaatgacgcggcggcctattacggcatggatgaggatctgctgcgccgcagcttcagcctcatcgtaggcagctggagcaactgacaaggagggactgccatgaaaaaggtactggtactggaggacgagtccagcatccgcagctttatcgttatcaatctccgccgcgccggctacgaggtggtggaggcggaaacaggcgaggaggcactggaaaagctgaagatccacagcgatgtccgagtggcgttgctggacattatgctgcccggtatcgatgggtttgaggtttgccgccgtatccgcgccaccaacgctgccatcggcatcattatgcttaccgcacggtcccaggaaatggataaggtgacgggattgatgaccggtgccgacgactatgtgacaaagcccttctccccggcggaactgactgcccgcgtggatgcgctgatgcgccggtccggcggcggtgtcgtagacgccggtgagatcgaccagccgcccttcctgctgaacacccgcaaccgtactctggagaagaacggtcagcggatcaagctcacccaggtggagtacgccatcatgaagatgtttatggagaaccccggcaaggcgctctcccgcgaggagatcctggacttggtctggggccacgactatttcggcgagctcaagatcgtggacgtgaatatccggcgcctgcggctgaagatcgaggacaatgccacgaacccaacctatattacgacgatctggggtttcggctacaaatgggggctgtgacagcagagcttttccgccagtacttcattgcagcggcttgacgtacacacagtacgcctgcgccgctgtggctcgtcctggcaaaaaatctctcgctgtcaggctttgcgccgcgcccgtgggtgcgctataccttattttgcgatgaaaggagatgaacgccttggcaggaaagaagcataaagtgcagggcctgcgccgccggtggctcaccggcagcatggggccggtgctggtcatattgctgctggtgggcgtgctcatctccgtgggttttgccagcaactactacaacagtgcgcgctctacactgcgggcaaaggccgcggcgggcgcggactatttcaacacctatgtgatgaccagctatcgggagtattaccgcagcgcgacgatctacgccgccgcctttgacgacagcgacaagatcgagctgcagttcctcaacagatccggccgcgtggaggtcacgacccggggcgtcaccaccggcacctaccccagcacgccggaaatactgcgggcgctggaaagcggcacggtgcaggactacatcggccgtgacagcgtcaccggggagcgcatcctggcggtgtccggcctgctgaagttcaacggccaggtggtgggcgttatgcgctacgttaccgccatcgggaacatcgaccggcaggtgctgctgacggtcctgctggtggccggcgtcatgctggcggtggtggggctgatcgtcatgtccagtatgatcttcatcaacaatgtggtggcccccgtgtccgccgtgtcagaggcggccaagcgtatctccggcggcagctacggcgtgcagatacccaacaagtactccgacgaaatgggcgagttggtggacaacatcaacgatatgtcccgcaagatcggcgagagcgaacgaatgaagtccgagttcatctcctcggtgtcccatgagctgcggacaccactgacggcgatcaacggctggggcgaaacgctgctggccgatgagtccaacgacgtgcagcagatcaagcgcggcgtgcagatcatggtgaaggagtcccgccgtctgaccaatatggtggaggaactgctgcaattttcccgcctggaggatgggcgcttcaccctgcaggtggaggacaccgatctgcaggcggagttggaggacgcggtgtacagctaccgggagctgtttcgtcaggacggcattgccctggagtattccagtgatcgggcggagtacagcgaggtcatctccggcgacccggaacgcctgaagcaggtattctgcaatctgctggacaatgcggccaagcacggcggcagcggcaagcgcatcgctgtgcatctgagccagcaggaaggggagtatgtgatcaccatccgggacttcggccccggtataccggaggcggagctgccctatgtgaagcagaagttctacaagggctcatccaaggctcggggcagcggaatcggtctggcggtctgcgacgagatcgtccagcgccacggcggacgactggacatcgccaacgccgagggcggcggcaccgtagttacggtgtatttgccgttgaaaaagcaggctgaacaggaattgtaaaaaagaacagaaaaaactcgaacaagtgttgcattttactgcaagctgtgctatgcttgcgtcagaaaggaattcagcagacctatggaaaagaaaaagggcgctttccgtaccagtatcggcggacaggcgctgatcgagggaatacttatgcgcggcccggagaaggatgcgatcgtggtccgttcaccggagggcctggtcaccaaggtgacccagcgcaaattcgtcaaggccaactaccccattctgggcgttcccattctgcggggcgcggtgacgttcatcggctccatgatcaccggcgtcaaggcgctgatgttctcggcagattacttcccggaggacgagaatgccaagccggacaagctggaggaatggctcaacaagcacgtgccggcggagaagctgcaatcgctgctggtgggcttttcagtggtgctgagcatcggcctcatgctggtgctgttcatgctgctgcctacgtttctggcggggctgttccacgccacaagcccagcgatccacaatttgatcgagggtgtggtcaagatcctggtgctgctggcgtacatgatcctctgctccagacagaaggacgtataccgggtgttctgctaccacggtgcggagcacaagaccattttctgctatgaggcgggactgccgctgacggtggagaacgttcgtatccagccccggcaccacccccgctgcggcaccagcttcctgtttgtggtcatcatcgtgtccatcattgtctccagcctggtgtttccctacatcaattggcagagcgtgtgggtccgtgtgggcgtgaagctgctgctgctggtgcccgtggtgggcatcacctatgagttcaaccgcctggtgggggcgcacgacaatgcgctgacgcgcgtcctctctgcccccggtatgtggctgcagaactttacgacccacgagccggacgacagcatgatcgaggtggcgatcgaggccatgaagctggtcattccggaggagaagggtaccgacacctggtgaaccggggtcgcgcagcggggcgcaaaacagcggaaagcgccgaaaaataccgaagaaagtgaaaacggtacgtattatggcgatcacatataacaatttgtatttggacgtgcggcagcaattcctgcgggcaggattgcccgaccccacgctggagtcccgggagttggtgtgctgcgcctccgggaagacccgggaggcgttgagccgggatggccggctgtacgtgccggagtcggtggaacagcaggtgcgccgcctggcggagcgccatctggccggcgagccggtggcgtacctgatcggcgagtgggagttctacggcctgccgctggatatctctgagagtgtgctgatcccccggccggacaccgaggtattggtggatcgggcgctgatgtacctgaagaccgtggccgagccccgggtgctggacctgtgtgcaggctcgggctgtatcggcctggccctggccaaaaacgcgccggagagccatgtggtgttgggcgagctggacgagtgcgcactgcgtatctgccgccagaacatccgccgcaatgacctgaccgggcgggtggtgtccctgcagctggacgcgcgggagaagccgtcggcccatctgggggagtttgactgcatcgtgtccaatccgccctatatccccgatggggacatcgcggagttggacgcgtctgtgcgggactacgagcctcatctggcgctgcggggcggcgcggacgggctggacttctatcgagcgatcgccggacactggacggcagcgctccgcgtgggcggacggctgctgttcgaggtgggtatcggccaggcggacgaggtgctgcggatcatgcggagtgtgggtttcggcgatctggagatcaccccggatctgaacggtattccccgggtggtagagggtgtgctgtgctcggagctttgacagcgtacgttgactgtccgttttttgggacagttggggagatatattagatacatcagaacttgaggaggacggaactatggcagtcaaaaaggaacctgtcgccccggcaccggtggtatccgacaaaaagaaggcgctggagacggccatgcagcagatcgagaagatgtacggcaaggggtcgatcatgcgctatggtgcggagagtacgctgaatgtggagtccattcctaccggctcactgtcgctggatctggcgctgggtatcggcggcctgccccggggccgtattgtggagatctacggaccggagtcctccggtaagaccacgctggcactgcacgtgctggccgaggcgcagaaaatgggcggcgaggtagcctttgtggatgcggagcacgctctggaccccacctatgccaaggcactgggcgttaatgtggaggatatgctgatctcccagccggacaccggcgagcaggcgctggagatcaccgaggccttggtccgcagcggcgccatcgacgtagtggtggtggactccgtggcggcgctggtgccccgggcggagatcgagggcgagatgggcgacagctttgtgggcctgcatgcccgactgatgagccaggccctgcgtaagctgacaggaatcatcaacaagaccaattctatcgtcattttcatcaaccagctgcgcgagaaggtgggcgtcatgtatggcaatccggaggtcaccaccggcggccgtgcgctgaagttttatgcctccgtccgcattgacgtgcgccgtatcgagacgttgaagtccggcggcgaggtcatcggcaaccgtacccgggccaaggtggtgaagaacaaggtggcgcctccgttccgcgaggcggagttcgatatcatgtacggcgagggcatcagcaagctgggcgatctgctggatctggcggtgaagctggacctggtgcagaaaagcggctcctggttcaatatgggcgagctgcgcctgggtcagggtcgtgacgcggccaagcagtacttccgtgaccatccggacgaagcggataagctggagacggcggtgcgtgagaacttccacaagctgatgggcagccagtcccgggtagcggccaaggccgccggacgggcggtggacgtgtccgccgacgattttgacgacgaagactgatgcggatcgagcgcattgaaaaatcaaagcacaagcaggagcgcgtgctggtgtttctggaggggggcgacctccttcgaatcaccggcgcggagcttctgcgctttggtttatacaaaggtatggacttgtcgccggcgcttgtggtagaattacaggcggcggcacagcagtctcagctgaagcagaccgcggcgcggatggcgtcgggacggatgttgtccaaaaaagaggtgcagcgccgtctgacaaaaaagggcgccacagaggagcaggcggcggacaccgccgactggctggagacgctcggcgcggtggatgacgagggctatgccggcgttatcgtgcggcattacggggccatgggttatggcccaggccgggtgaaacaggaactgcaccgccggggcgtgccccgggagctgtgggacgaggcgctggcacagctgcccccggcagcggacgccgtgcggaaggtggtggctgccagactgcggggccggcccatgacacaggaggacagccggaagctggccgcggcattgcagcggcgtgggttttcctggaatgacatacggcccgtgctcaatgagtgggggcaggaaatagacgagacgtgaggtatacgacgtgaaggttgcatttatttcccttggctgtgccaagaatttggtgaatacagagcagatgatggctctgtgccgcgatgcggggcatacgctgctggaggcacccgccggtgcggacgcggtggtcatcaacacctgcgggtttatcgacagtgccaaggaggaggcgatcgacaccatactgtctgtggcggcgttgaaggccgagggacaggtgggcaagatactggtgacggggtgcctgacccagcgctaccagcaggagatactggacgagctgcccgaggtggacggtatcatgggcaccggcagctacggtgagatcgtgccggcgctttccgagatgatggccggcggtacgccccggcgctttgccgatatccacgggatgatcgatgaattcgaccgggtgctgacgacgccggggcactatgcctatctgcgtattgccgagggctgcgacaaccgctgtgcatactgtgtgataccctctctgcgcgggaaataccgcagccgccgcatggaggatgtgctggtcgaggcgaagcatctggctgacgccggggtgaaggagtgcatcgtcatcgcccaggatatcacccgctacggcatcgacctgtacggcgaaaagaagctggcggcgctgctgcgggagctgtgtaagctggacttccgctggatccggctgcactatctgtatccggacgagttcaccgacgagctgatcgacaccatcgccgcggaggagaaggtgctgccctatctggatatccccatccagcactgcaacgacaaggtgctgcgcgccatgaaccgccgtggcgacaaggcggagctgctggcactgttccgtgagctgcgggcgcgtatccccgacctggtgctgcggaccagccttatcaccggtctgcccttcgaggatgaggcggcgtttgaggagctgtgcgaatttttacaggaggtccgcatcgaacgggtgggcgtgttcccctactccccggaggaggggacaccggcggcgcgcatgctgaaccgtgtggacaccgccgaggccgagcgccgggcggagctggtggtggacgtacagtcccgaatcatggacgacttcaacgacagccgtatgggcactgtggcagaggtgctgtgcgacgggttcgaccaggaggccatgcagttcgtggggcgtagctacgccgagagccccgatattgacgggcgcatctatttcaccgccgaccatgaggtggaggcgggtgagttcgtgccggtgcgtatcaccggcaccatggacggcgagttgaccggcgagttggcggagtaaaagggggctttccctttgcccggcaccgtgctataatgctgcgagagataaaagcgaaaggtggatacatatatgactacggcgaacaaattgacgatcctgcgggtgctgatgattcccgcgttcttggtggtgttgtactggggttttcccggcagccgctatgtggcgctgggcatctacatcgtggcctgtttgaccgacctgctggacggctacattgcccggcactataatcaggtctccgatttcgggaaattcatggatccgctggcggacaagtgcctggtgatggcggcgctgtgctggttcgtggaggagggcaccttcgccgcgtgggtgttggccatcgtgctgctgcgggagtttgccgtgtccggcatgcgtttggtggctgtggagaagggccgggtcatcgccgctggctggtccggtaaggtcaagaccgccagcaccatggtgtgtatctgcctgatcctgctgggtattcctcagtggctgaactatgtgtgtcagggcgtcatcctcgtgacaaccgtgtactccggcatcgagtacttcgccaaaaacgctgatgtgttcaaagaggtcaaatgacttgacacggcgggaaattcctgttactattaactgaaccgaatagcgcgatgaacggaaagagtacgcgccacagctttgccaagagagggacggtcaccggctgaaagccgtcccgcacagcggtgcagaaagtgcgtccgggagcgcgagggatgtggatgccctccgcatggcctgcgttatggccggacttgagtgataaacgagagtggaaccgcgaagtctttttcgcctctcatgccctacggcatgggaggcgtttttgttcggcataataatataatgtagatagaaggagaaccgttatgtatttgtataattccgccacccacaagaaagaggagttcaagacccatacgccgggccatgtggagatgtacacctgcggccccaccgtgtaccacttcgcccacatcggtaacctgcgctcctatatcatggaggacgtgctggagaaatacctgcgctacgcgggctacgacgtgaaccgcgtcatgaatattaccgacgtgggacacctgacctctgatgccgatgagggcgaggacaagatgctcaagggcgccaagcgtgagcacaagaccgtcatggagatcgccaagtattacaccgacgcgtttttcgaggactgccggaagctgaacatcaagcgcccggacgtggtgcagcccgctaccggcctcattgacgactatatcaagatcatcaccaagctcatcgacaccgggtatgcatatctggccggcggcaacgtgtatttcgacaccagtaagctgaagcggtactacatcttcaacgatcacaacgaggaggatctggctgtgggcgtccgcgagggcgtggaggaggacaccaacaagcgcaacaagaacgactttgtgctgtggttcaccaagtccaagttcgaggaccaggcgctgaaatgggactctccctggggcgtgggctatcccggctggcacattgagtgctccggtatttccatgaagtacaacggcgagtatctggacctgcactgcggcggcgtggacaacgccttcccccaccacaccaatgagatcgcccagagcgagagctatctgggccatccctggtgcccccactggtgccatgtggcacacctgaacaccgaccatggcaagatgtccaaatccaagggtgagttcctgacggtatcgctgctggaggagaagggctatgacccgctggcctaccggttcttctgcctgcagagccactaccgcaagagtctggtgttcacctgggagaacctggacaacgccaccgtggcctacaacaagctgctgagcaagatcgcggcgctgaaggatgagggcgaggtggaccgggctgcctttgacgagtacaaggccaagttcatggctgccatggacaacgacctgaacacctccatggctgtgacggtgctgtatgacgtgctgaaggccaagaccaatgacaagaccaagctggccctgctggacagcttcgacaccgtgctgggcctgaagctgctggagaaggccgctaccctccgcgccaagcaggccgccgcccccactgccggcgagttcaccgtcatcagcgaggacggcgagaccaacgcagaagtggaggcgctgatccacgcccgcgccgatgccaagaaggccaagaactttgccgaggccgaccgcatccgcgacgagctgaaggcccagggaatcgagatcaccgacgtgcccggcggcgcaaagtggaaacgtgtctgaatataaaaaagaccgcctgtgggcggtcttttttcggctgggaacaaatcgcggcgcatatccgtcaaaggggcagaaggaagaaaaggaggtatttcccatgaaacgactgaaagcggccatgtgcgcggtgctggcggggctgatgctggcgggctgcggttcgaaagaggtgataacctgcagggcagagggaccggcagcggcggtggatctgacgaagtatgtggtcaaagaggcggcgtaccctgcgtacccggcggaaccgcggtttgaggactacttcgatgaaaacggtgagggcgactgggacgcctacgacgcggcgtacaccgagtaccgggaggcgctgcaaaagctgggcaagctggatgcggagccggacggcggcgcggtgttggcctttgcggacaggacgctgggcaagatcttcgccgacagcgagaaccgggtgtactcgcccatcagcctgtatgtggcgctcagtatgctgacggagatgacggcaggggagacgaagcagcaggtgatggagctgctgagcgcggctgacagcgaaacgctgcggcagacggtgcgcgacctgtggatgagcgtgtatctggacgacgggcggtcggtgtgccgtctggccaacggcgcgttcctgcgggagaacgccgacgtgaagcaggaggccgtggacgcgctggcggactggtactatgcgtccacctaccgggtgcccatgggcacggcggaggcggacgaggccatcgccagttggctgaaccagaacaccggagggctgctgtcccaggagacgcgggacattcagaccgaagtggacaatctgctgcggctgtacaacaccatatattataaatccagctggcgtgacgccttcgagagcagccggacgaagcaggacacattcaccgctgccgacgggtcggcgcagaaggtggacttcatgcaccgcacggagagcggcagctatcggaagggtgacggctacaccgccgcgccccggtcgctgaactatggccgcatggtgttcgtgctgccggacgagggcgtgacgccggagagcctgctgcagcggcagggcttcctgacggagctggccggggactacaacgccgcagagctggtgtggtcggtgcccaagttcgatgtgaagtcctccacggggctgaatgaggcgctgcgctcgctgggcgtgactggcgcttttgacgggacaaaggcggactttacgccgctgaccgacaacggcgcggtggtggacagcgtcatgcaggcggcgcgggtgaagatcgacgaggacggcgtggaggccgcggcctacacggagctggtctgcgcggactcggccatgatggaagtgccgcccaccgtggagatggagttggatcggccgttcctgttcgtgattttcgactacaacaatgtgccgctgtttgtgggcacggtgaatacggtggcgtgaaactttaaaaagcgaccggcaaaagctacaaaaatacctgaaaaaatttgtataggaaatagaaaaatccccttgacataaggggatttttcctttattatatatgggtacgcgcgcgaagggtgctgcacacccggaggcgtttgcaactgcgatgaaccgggagattgctccgcaaggaggtaacttccggggagtatgtccgataatcgggcggctgagagatttctgttcgtcggcgtagatcgccgcgccagaagggcaccggcctgatcgccggtgtttcttatgagtcggaatgatacgcacggaacggcgtataagaaatttcccgccgtacggcattggtcaaagcaacaaaaaccgtacgaattttatggaggaacaaaccaaatggcaaaagaaatgatccgcattcgtctgaaggcctatgaccaccaggtcatcgaccagtccgcagagaagatcgtcgagaccgccaagcgcaccggcgctaccgtctccggcccgatccccctgcccaccaagaaagagatcgtcaccatcctgcgcgctacccacaagtataaggacagccgtgagcagttcgagcgccgcacccacaagagactgatcgacatcaccaactccacccccaagaccgtggaggcgctgatggctctggatctgcccgccggtgtggagatcgagatcaagctgtaaacaccttatataatatccctgcaaacgaatttgcttgctacccagccggggcgctaacttgcgtgaggcgttccgggggttacgtcggcagagcaagcggcttctacccaatggaagttgaatctatgtcgaccaataacctttaaggaggatcatacatgaaggcaatcattggcaagaaagtcggtatgtctcagatcttcgacgaaaacggcaaggtcatccccgtcaccgttatcgaggcgggtccctgcaccgtcgtccagaagaagactgccgagaaggaaggctacgccgctgtgcagctgggcttcgaggatgtccccgagcgcaagctgaccaagcccgagatgggccacctgaacaaggcgggcgtggctcccaaaaagtacctgcgcgagttcgacctggagaacgccgccgagctgaacatcggcgacatcatcaaggccgacacgttccacgagggtgacttcgttgacgtgaccggcaccaccaagggtcacggctaccagggcgttgtgaagcgctggaacgccggccgtacccccatgagccacggcggcggccccgtccatcgtcatgccggttccatgggctctaccaccgatcccagccgtatcttcaagggcaagatcggcgccggccagatgggctgcgaccaggtgaccatccagaacctggacatcgtgaaggtcgatcctgagctgaacatgatcgcggtccgcggcgccatccccggccccaagggcggtctggtgctcatcaagtccaccgttaagacccaccgcatcaagcacgctgacgctggtatcagcaacaacccgcagaaggcttccggtcgtaacccgcagaaggcttccgcccgcactaagtaaggaaaggagtgcttaaggaaatgtctgctatcaaagttttgaacatggccggcgctgaggtcggtactgttgagctgaacgacagcatcttcggcgtggagccgaacaccgccgtcgtgcacgaagtggtcaagaaccacctggcaaattgccggcagggcacccagagcgctctgacccgcgccgaggtctccggcggcggcaagaagccctggcgtcagaagggtaccggtcacgcccgtcagggcagcacccgcgcgccccagtggacccacggcggcatcgtgttcgcccccaagccccgcagctactcttacgttctgaacaagaaggtcaagagactggctatgaaatctgctctgtctgccaaggctgctgccggcgagatcatcgtcatcgacagcatcaagatggacagcatcaagaccaaggacttccgcgcgttcctgaacgccgtcaaggccgacggtaagtctctggtggtcacccccgccaaggacgagatcgtcgtcaagagcgcccgcaacatccccggcgtcgagacctctatggccaacctgatcaatgtctatgacattctcaaggccaagtatctggtgctggataaggaagccctcaccgtgatcgaggaggtgttcgcgtaatggctaacgtatacgacatcatcatccgtcccatcattaccgagcgttccatggccgctacttccgacaagaagtacgtgttcgaggtggcgccctccgccggtaagatcgagatcaagaacgccgtggagaagatcttcggcgtgaaggtcgccaaggtcaataccatcaactacgatggcaagaccaagcgcatgggcgccggccgtcccggtacccgtaagagctggaagaaagcgtatgtccagctggctaaggattccaagaccatcgagttcttcgagggtatggtgtaagagaagggagtgtagagaatgtctattaaaacttttaagccgaccaccccttcccgccgccacatgactgtttccggcttcgacggtatcgacaagcacgcgaagcctgaagccagcctcgttgaggtgctgaagaagaacgctggtcgcaacagctacggccgcatcaccgtccgtcatcgcggcggcggcgagaagcgcaagtatcgcatcatcgacttcaagcgcgacaagatggacatggaagccaccgttctgcgcctggagtacgatcccaaccgcagcgccaacatcgccctggtccagtacgaggatggcgagaagcgctacatcgtcgctcccgttggtctggccactggcgacaaggtgatctccagcgccgctgccgatatcaagcccggcaactgcctgcccatcgccaacatccccgtgggtaccgtgatccacaacatcgagatgcaccccggcaagggcgcccagctggttcgctccgccggcgcctatgcccagctgatggctaaggaaggcgacaacgcccagatccgtatgccctccggcgaggtccgcatcatccgtaccaactgcaaggcctgcatcggtcaggtcggcaatctggagcacgagaacatccagatcggtaaggccggtcgtaagcgtcacatgggttggcgtcccaccgtgcgcggctccgtcatgaacccctgcgatcacccccacggcggcggtgaaggcaagtcccccgtgggccgtcccggtcctgtcactccttggggcaagccggctctgggttacaagacccgcaagaagaagaaccccaccgacaagttcattgtcaagcgtcgcaacgtgaagtaaaggaggcaagagaatatgagcagatctatcaaaaaaggcccgtatgttgcccctgagctgctgaagcgggtcgaagagatgaacgccaagggcgagaagaacgtgctgaagacctggagccgcagctccaccatcttccccgccttcgtcggtcacaccatcgctgtccacgacggccgccgtcatgtgcctgtctatgtgcaggaggacatggtgggtcacaagctgggcgagttcgcgcccactcgtaccttccgcggccataccaagaaagcttaaaaaggaggatgcagagtaatatggaagcgaaagcatatctgagatacgtccgcatctctccccgcaaggtccagatcgtctgcgatctgatccgcggcaaggatgccaagactgctatggcgatcctgatgaacaccccgaagtccgcctccgagcctctggtcaagctgctcaagagcgcctgcgccaacgcggagaacaacttcagcatggatcccgacaagctggtcgtgacccaggtgttcgccacccccggccccatcctgaagcggatgatgccccgtgcacagggccgtgcctatcgcatcaacaagagaacctctcatgtgacgctggccgtcgcggagagagactaagaaagggaggaacagttaaatgggtcagaaagttaatccccatggtatgcgcgtgggcgtcatcaaggactgggattcccgctggtatgccagcaatgagaaggtcggcgatctgctggtcgaggatcacaagatccgtgtgtacctgaagaagctgctgtttgccgccggtgtctccaagatcgagatcgagcgcagcaacgaggtcgtcaccatctatctgcacgtggcacgccccggcgtggtcatcggcaagggcggcgagcagatcgagcagtaccgcaaggacgtggagaagctgatcggcaagaccgtgaagctgaacatcgtcgaggtccgcaaccccgatatggacgcgcagctggtggccgagaacatcgccgcacagctggagaagcgtatctctcaccgccgcgctatgaagaacgccatgggccgcgctatgcgcgccggcgccaagggcatcaagtgcaactgcggcggccgtctgggcggccgcgagatcgccggcagcgagcactatcacgagggtaccatccccctgcagacgctgcgtgccgacatcgactacggctttgctgaggctgctaccaccttcggccgcatcggcgtgaaggtttggatctacaagggcgagatcctgtcccaggccctgcgcaccaccccgcgcacgctggacaccagcaagccctatcaggagcgtcgtgagcgtcgcggcaaccgtcgtgacggtgaccgccgcggtggcttccgccgcgatggccagaacggcggcttcaaccgtgaccgtcagaacggcggcttcaaccgcggtccccgtcccgagggcggcttccgcaagcctgcagaaaagaaagaaggaggcgctcagtaatgcttctgcccaagagagttaagtaccgcagagtacaccgtggccgcctcaccggtaaggccatgcgcggcaacaaggtcacctacggcgaatacggcctggtggctctggagcccagctggatcaccagcaaccagatcgaggcggctcgtatcgccatgacccgctacaccaagcgtggcggtcaggtctggatcaagatcttccccgacaagcccatcaccgagaagccggccgagacccgtatgggttccggtaagggttcccccgagtattgggtcgcagtagtcaagcccggccgtgtcatgttcgagatcgccggtgtttctgaagaggtcgcccgcgaggccctgcgtctggccagccacaagctgcccatcaagacgaagatcgtcaagcgcgaggatctcgaagcccaggaagtaggtgaatgagatgaaggcaactgaagtacgtgcaatgaccgtggagcagctgaacgagaagctggactccctgaagaaggatctgttcttcctgcgtatgcagcacgcaaccaatcagctggacaatcctctcaagatcgccgagaccaagcgcgacatcgctcgtgtgaagaccgttatccgtgaaaaggaggagaagtaacatggaagagaagagaatttcctcccgcaagaccagagtcggcaaggtcgtttccgataagatggacaagaccgtggtcgtcgccatcgaggaccgcgtcgcccatcctctgtataagaagatcgtcggccgtacctataagctgaaggctcacgacgagcagaacgcttgcggtgttggcgacgtcgtgaaggtgatggagacccgccccctgtccaaggacaagcgctggcgcgtggtcgagatcgtcgagaaggctaagtaaggaggtgccgtaagtatgatccagcaagaatcttatctgaaggtcgctgacaataccggcgccaaagagatcaagtgcatccgcgttctgggcggctccaaggtcaagtacggcaacatcggcgacgtcatcgttgcctccgtgcgtaagagcactcccggcggtcaggtgaagaagggcgaggtcgtcaaggccgttatcgtccgcagcgccaagggcgtgcgtcgtgccgacggcacctatgtccgtttcgacgacaacgccgccgtcctcatcaaggacgacaagaaccccagaggcacccgtatctttgggccggtggctcgtgagctgcgcgacaaggattacatgaagatcctgtccctcgctcccgaagttatttaaggaggggacggacacatgaacaatctgaagatcaagaagaacgacaaggtggtcgttctgtctggcaaggacaagggcaagaccggcaaggtgctgggcaccgttcccagtgagcgcaaggtcgtggtcgagggcatcaatatggtgacctgccacatcaagccccgcaagcagggcgaagagggcggcatcgtcaagcgcgaggcggctatctacgccagcaaggtccaggtggtctgccccaagtgcgacaagggcacccgcgtggcctatgagatcaaggacggcaagaaagtccgcgtgtgcaagcactgcggcgctgccctgtaaagaaaggagagagtaagtaatggcacgtctgaaagtcaagtataccgaagaagtagctcctgctctcttcaagaagttcggctacaagtccaccatgcagatccccaagatcgacaaggtcgtcgtgaacgtgggctgcggtgaggcgcgtgagaacgctaaggtcctggacgccgtgtgcggcgacctggccaccattaccggccagaaggccattgtcaccatcgccaagaagtccgtcgcgaacttcaagctgcgtgagggtatgcccgtgggcgccaaggtcacgctgcgcggtgacaagatgtgggagttcctggatcgtctgttcaacgtggctctgccccgtgtgcgtgacttccgcggcatcagcgccaacgcctttgacggccgcggcaactatgccctgggcatcaaggagcagctgatcttccccgagatcgagtacgataagatcgacaagatccgcggcatggacatcgtcatctgcacgaccgcccagaccgatgaagaagctcgcgagctgctgactctggtcggcgctccctttgaacgctgattaggaggagaacgaaatggctaagaagtctatgatcctgaagcagcaggcgcctgcgaaattctccacccgcaagtacaaccggtgcaagctgtgcggccgtccccacgcctacctgcgtgactacggtgtgtgccgtatctgcttccgtacgctggcgtacaagggcgagatccccggcgtccgcaaggcttcctggtgatcttttgtcctcatacttcgttggcgcggctcggcgtacgcaaagtacgccatcgcctcgccgcctcgtctgagaacaaaatctctaccaggagaactccggcagagagcgtcgctctccgccgaacccatgtacctaagagccgcaaggctccggtaatacaggatggcgaaaggtcactggtaattaaacaccggcagtgcgctgccgacggactaaattatcagtgatacctcgctgccttaacaggcgtgagcctgtaactctaaaataggaggaaacattcgtatgcacatcactgatcctgttgccgatatgctgacccgtatccgcaacgccaacaacgccaagcacgagaccgtcgacgttcctgcttccaacatgaagaagagcatcgctcagatcctgctggatgagggctacatcaagtccttccaggtcatcgacgacggtacccagggcgttatccgcatcaccctgaagtacaatgccggcaaggagaaggtcatctccggcctgcgccgcgtgtccaagcccggcctgcgcgtctatgtgggcgccgacgagctgccccgcgtgctgcgtggtctcggcatcgcgatcgtatccacttccaagggcgtcatgaccgacaaggctgctcgcgcagcgcacgtcggcggcgaagtccttgcgttcgtatggtaaggaggtatttgaacaatgtcgagaattggtagaatgcccattaccgtccccgccggtgtggaagtcaccatcgcggagaacaacgttgtcaccgtcaagggccctaagggcaccctgacccaggccctgcgtccggagatgatcctggagcaggacggcaacaccatccatgtcaagcgcccctccgacgacaagctgcactgcgcgctgcacggcatgacccgtgcgctgctgcacaacatggtcgtcggcgtcagcgaaggcttcaagaaggagctggagatcaacggtgtcggctatcgtgccgccaaggagggcaacgagctggtcatgaacctcggttactcccatcccgtgaagatggcggagatcgacggtattactatcgacgtgcccggccccaacaaggtcgtgatctccggtcccgacaagcagaaggtgggccagttcgcggcggaagtccgcgagaagcgtcctcccgagccgtataagggcaagggcatcaagtatgttgacgaagtcatccgccgcaaggtcggtaagaccggcgctaagaagtaaggaggtgtgccgatatgattaaaagacccgataccaacgcgcagcgtctgaagcgccataagagagtccgcgccaagctgtccggcactcccgagcgtccccgtctgaacgtatttcgcagcgagaagaacatctacgcccaggtcatcgacgatgtggccggcaataccctggtctctgcttcctctctggacaaagagatcgagggcaacggcggcaacaagaccgcggcccgcgctgtgggcaagctggttgccgagcgctgcaaggctaagggcatcgataccgtcgtgttcgatcgcggcggctacctgtaccacggccgtgtggccgagctggctgaaggcgcccgcgagggcggcctggaattctaaggaaggaggacttatcaatggccagatttgaaagagagcagagcgagtacattgaaaaagtagtcgctaccaaccgcgtttccaagaccgttaagggtggtcgtgtcatgaagttctccgccctgatggtggtcggcgacggcaagggcaaggtcggctacggcctgggcaaggccgccgaggtgcccgaggcgatccgcaagggcatcgaggacgccaagaagaacatgatcaacgtgtccctgtccggcagcaccatcccccacgagatcatcggcgaggccggtgcaggccgcgtgctgatgaagcccgccgcccccggtaccggcgtgatcgccggcggccccgtgcgtatcatcatggaggccgcgggtatcaaggatatccgtaccaagtgcctgcgctccaacaccgctgtgaacgtggtggccgctaccttcgagggcctgaagtccctgcgtacccccgaagaagtcgcccgcacccgcggcaagagcgtggacgagatcgtgggttaaggagggactgaacaatggctaatctgaagatccagctcgtaaagagcctcaacgggagactggagaagcacatcgctaccgccaactccctgggcctgcgtaagatcggtgataccaccgtccagcccgacaatgcccagacccgcggcaaggtcgccaagatcggctacctgctgaaggtcactgaagaataaggaggtgcgagagaatgaaactgaacgaactgtctcccgcagccggctccgttaaggaagcctaccgcaagggccgtggtcacggctccggcaacggcaagaccgcaggccgtggtcacaagggtcagaaggcccgctccggcggcggcacccgcatcggattcgaaggcggtcagatgcctctggcacgccgcatccccaagcgcggtttcaacaacatttttgccaagcccctggagatcatcaacctgagcgccctcaacaagtttgaggacggcgagatcgtcaccgcggaagccctgcttgctaagggtatcctgagcaagtgcgagtacggcgtcaaggtcctgggtaacggcaaggttaccaagaaggtgaccgtgcaggccgctgctttttcccaggctgccaaggaagcgatcgaggcagccggcggaaaggcagaggtgatctaagtgatccagacgatcaaaaaagcgtgggcgatccccgagcttcgtaagaagatcgtcttcaccgccctgatcctgctgattttccgtatcggcaacgcgatccccgtgccctatgtagacacaaagctgctgggcgattacctgtctcagatgagcaccacggtgctgggcctgtacgacgtgatgtccggcggtgctttcgccagcgctacagtgtttgcactgggcgtacagccctatatcaacagctccatcatcattcagctcctcaccatcgccattcctcccctggagcgtctggcccgtgagggcggcgaggagggcaagaagaagatccagtccatcacccgttacgccacggtggccatcgccatcctgcagggctggggctactacgccctgatgaagaacgccagcatcctcaccaataccggtgtgtgggcggcgctggtcatcattatctccttcattgccggctcctccttcgtgatgtggatgggcgagcaggtcacggaattcggtatcggcaacggtatctccatcatcctgttcgcgggtatcctgtcccgcgtgcccagcatggtgtccggcatgagcatttccctgaagtccggggctatgcagtggtggcacgcactgttggtggtcatcggcattctggctctgatcgtactgatcacctgggtcaacggcgccgagcgccgcatccccgtgcagtacgccaagcgccaggtgggccgtaagatgtacggcggtcaggcatctacccttcccatgaaggtaaatatgtccggcgtgctgcctatcatctttgcccagtccatcgccatgatcatccccacggtggcggcgttcctgcccgcaccggagaagggtacttttgcgtatactttggtgaacgctgtggacagcaagagtgtactgtatatgatcgtctacttcctgatgatcatcgctttcagttacttttatgctaccatccagttcaaccccgttgagatatccaacaacctgaagaagaacggcggctttatccccggcttccgcccgggcaagcccaccgcggacttcatcaagaaggtgctcaataaggtcacgctgttcggcgctatctacctgggcgtcgtggcgatcctgcccctgctgatcggcaagatcgtgaatgtgccctctctgtccatcggcggtacctccgtcatcatcgtggtcggtgttgcgctggagaccgtccaggctctggagtcccagatgctgatgcgtcagtacaagggcttcctggaataatttgaggtaattaccatgaaactgatccttttaggcgctcccggtgccggcaagggcacccaggcagacatcatcaagaaaaagctggatatccccaccatctctacgggcaacatcctgcgggcggctgtgaagaacggcacgcccaccgggctgaaggccaaggagtatatggatgctggcaagctggtgcccgatgaggtcatcatcggcatcatcaacgagcgtttgcaggaggccgactgcgccaacggctacattctggacggggtgccccgcaccatcgcccaggctgaggcgctggagcaggcgggtatcagattcgacgctgtggtcgccatcgagatccccgatgagaagatcatcgcccgcatgggcggccggcgtgtctgcgagagctgcggcgccagctatcacatcataaacatccccccgaaaaaagagggaatttgtgatgtgtgcggcggtgcgctgaagcagcgtaaggatgatgacccggagacggtgaaagaccgtctggcggtctatcataaggagacggaacccctcaagggcttctatgaggccagaggcgttctgaagaccgtggaggaccagcccactgtggagggtacgacacgggagatcctgcgggtgctgggagtggccgaatgatcacgctcaagtcaccccatgagatcgagctgatgcgccgggcgggcaaaattaccgcggcagcccgtgccctggcacgggatatggtaaaacccggtgtcaccacagctcagatcgacaaagcagtgttccagtttatcaaggagcagggcgcaacgccctccttcctgcactacaacggctatccggccagcgtgtgcgtcagcgtcaacgacgagatcatccacggcatccccggcaaacgggtgctgcaggagggcgacatcgtcagcgtagacgtgggggcgttcatcggcggtttccacggcgactgcgccggcacctatccctgtggtcaggtgtccgacgaggcgctgcggctgatccgggtgacgcagcagagcttctttgagggcataaagtatgcccgcgagggctatcgcctgtcggatatctccgccgctgtgcaggcgtatgtggaggcaaacggcttcagcgtcgtccgggaatatgtcggccacggcatcggacaccagatgcatgaggcacccgaagtccccaattacggcaagcccggccatggaccccgtcttctgcggggtatgaccatcgccgtggagcctatggtcaacgcggggacggccgctatcaggcagatgccggatggctggacggtgaggacagccgacgggaaaaacgccgcacactacgaaaacaccgtactgatcaccgacggggagccggagcttctgacggacccggagaagtcattggtgtgatatggacattgtgaaagcgaatatcgtaacatctaccgccggcagggataagggagaggtcttcttcgtccttgcgacggagggggacttcctcctgctggcggacggaaagacgcggcccgtggaacggccgaagcgcaagcggcgcaaacacgcggcgctgctccggcgcgatgggggcgcggtttcccagaggatcagaagcaacgaaaccatcacaaatagtgagcttcgtaaagccatcgccgcgatacgcggcagtgatcaagaccaggagggataacacttggcaaaatccgacatgatcgaagtagagggcgtcgtcgttgaatcgctgcccaacaccacattccaagtcgacattggaaatggacacacgatcttagcgcatatttccggaaagctcagaatgaatttcatcaggattctgcccggcgataaggtgacagtggaaatgtcgccttacgatctgacccgcggtcggatcacctggcgcagtaagtaggaggtttatcaaaatgaaagtaagaccgtccgtgaagcccatgtgcgagaagtgcaaagtgatccgtcgtaaaggccgtgtcatggtcatttgcgagaatcccaagcataagcagagacagggctaagtagaaagtggaggtgctctaaattatggcacgtattgccggtattgacctgcccaaggataagcgaatcgaaatcggtttgacttatatctatggtattggaagaaagagtgctcaggacatcctggcacagacaggcatcaaccccgacacccgcgtcaaggatctgacggaggccgatgaggccaagctccgtgaggccattgaccacggctacatcgtcgagggtgatctgcgtcgtcagaccgcgctggatatcaagcgcctgactgaaatcggctgctatcgcggcatgcgccaccgtcgtggccttcccgttcgcggccagcgcagcaagaccaacgcacgcacccgcaaaggccccaagaagactatcgctaacaagaagaagtaaaggagggaagaatagatcatggctaacgtaaaaggcaagaaggtcattcgccgtcgtcgcgaaaagaagaacatcgagaagggccaggtccatatccgttcttccttcaacaacaccatggtgaccgtcaccgactctcagggcaatgctctgtcctgggcctcctccggtggtctcggtttccgcggcagcaagaagtccacgccctttgccgcccagagcgccgctgagacggctgccaaggctgctatggagcatggcctgaagaccgttgaggtcttcgtgaagggtcccggtcagggacgtgaggcggctatccgcgcgctgcaggccgtgggcctggaagtgacgatgatcaaggacgtcacccccatcccccacaacggctgccgcccccccaagcgtcgtcgcgtgtaatcggaagaaggaggatattaaatcatggctaagaatatgcagcctgtcgccaagcgttgcaaggcgctgggtatttctcctaccgtcatgggttactccaagaaggagaccaagcgcaaccccggcggccagatgagaaagaagaagagcgagtacgccatccagctcaacgagaagcagaaggtcaagttcgtgtacggcatcctcgagaagcagtttcgcgcttactatgagaaggcctccgcgatgcccggcaagaccggcgagaacctgctgagcctggtggagcgccgtctggacaacgtggtgtaccgcctgggcttcgccatgacccgccgcgaggcgcgtcagctggtgaaccacgcccatttcaccgtgaatgggcacaaggtcaacatcccctcctatctggtgcgcgtgggcgatgtgatcgaggtcaaggagggcagccgctcctccgtggcgtttaagcgcctgaccgccgaggatgcacccatggtcaccgtccccaagtggctggagcgtgacaagaccgccctgaagggtaccgtcgtcaccctgcccgcccgcgaggacatcgatatgcccatcgaggagcatctgatcgtcgagttgtactccaagtaatagggttctgaccctcacgaagcactggaatgaaattggcgcggaaggcaccgcgccgccaatagaatgaaggagggtactgcatgatcgaaattgagaagccccagatcgagtgtatcgaaacacccggcgacgcttcctatggaaaatatgtgatcgaacccctggagcgcggatacggaacgaccctgggcaatgcgctgcggcgcatcctgctctccagcctccccggaaccgcagccaccagcatcaaaattgccggtgtgcagcatgagttctccaccatccccggtgtgaaggaggacgtgacggagatcgttctgaacgtgaaaaatctgctgacgaagctgcacagcgacgccgtcaagaccgtgtttatcgaggcggccggaccctgcgaggtcacggctggtgatatcaagactgacggcgaggtggaggtcctgaatcccgagctgcacattgcaacgctggatgtgggcgccactctgagcatggagatcaccttgagccacggccgcggctatgtctccgccgacaagaacaaggcggcgcgacccggcgtcatcggcgtgatccccatcgacagtatctatacccccgtgtacaaggtcaactacactgtggagagcacccgtgtgggcgcttccagcgactacgataagctgacgctggaggtctggaccgacaccaccatcgctgcccgcgatgcggtgtccctgggcgccaagattctctgcgaccattttgccctgttcaccgacctgtccgacacgctgggcgataagtccaccgtggtggagaaggcgcaggactccaaggacaagatgctggagctgaccatcgaggaactggatctgtctgtacgcagcttcaactgcctcaagcgcgccaacatcaacaccgtcgaggacttgatttccaagaccgaggacgagatgatgaaggtacgcaatctgggacgcaagtccctggaggaagtcatcaacaagctggcgatgatgggcctgtccctggccagcgaagacaacaactaacgatccagcgcataccgcgcccgatcataacaaggaggaaactgaaatgcccggaactcgtaagctcggtaagactaccgatcagcgtatggcgatgctccgtcagcaggtcaccgatcttctggacaacggccggatggagaccaccatcacccgcgccaaggagatcaagcccctcaccgagaagatgatcactctcggcaagaagggtgacctggccgcttaccgtcaggcgctgagcttcatcacccgcgaggatgtggccaacaagctgttcaaggaactggctcccagctacgccgagcgcaacggtggctatacccgcatcatccgcaccggcgtccgccgcggcgatgctgccgagaccgccatcatcgagctggtgaagtaattttactttcataaaaaagaacacgccgacaggcgtgttctttttttgcgccgtcggggaggacgggcggcggagggcgtcgacgggagggcggcggagaatgcccaatgcggcaagtctgcggagaggggaaagaagcggcggcggagtgcatatactgcttccggtgatgtgatgagaagatgggtttgcgctttgctggcgggggtggtgctgctgtccggctgcggggcaggggtgatctcgacggtgggggagacgagggataccggcgatccaaaatacgtggcactgacctttgacgacgggccatcgccccggtgtacgccgcggctgctggatggtctgcgggagctgggagcgaaagctacattctttgtggtgggctgtcaggcggtgaaggacccggacatcgtgcagcgcatcgcaacggagggccatcaggtggggaaccactcctacgaccacgcagatctgcacagcctgacgtcggcgcaggcgatggcggatctggagaaaaatgacgcgctgctgcgggagctgctgggggagggggagtactgggtacggccgccctacgggctgatgacggaggcagaggccgcggcactgtccgtgccgctggtgaactggtcggtggacacggaggactggcggacgaaggacagcggaaaaatactggacgtgatctaccgctgcaccggggacggggacatcgtgctgctgcacgaccgctaccagaacacagtggatgcggtgctgatggcgatcgagcatttacagcagcagggctacgtattcgtaacggtggcggagctgctggagatcaagggcatagcgccgcaggcgggggagacgtaccgccgggcagaatagaaagcgccccggagcgatgctccggggcgctctgtgcagttgcgttacgcagcggcggccagcatacagttgatgaccagggtcagcacgatgaacacggcgcccacccacttggtacccttggccagcttggcatccaggctcttggccttggacttggccatatagctgtcggcaataccgccgatggtgccggacagaccctggctcttgccggactggaacaacaccaccaaaatcaaaaacagggcggcgatcagctgcaaaataatgataacagtcaacatttcggactcctccacctattccatgccatacggcatttgtatcacagtacattgcattttaccataatacaacggactttgcaagagggaatgtgctgttttatggttgttttttatgcttccttcgccgggtgaaaagtaaacgggcgccgttcggcttacggcgcccgcttcagaggtgaagtttcacacagcaccctcaaaacctcccgccagaggtgccgacagccgcacggctgtgcggctgcccgacgatttgaggatagaaaggaaaagcaattcatgtaaaagaattactatgggtacaatacaacagaagaccgtggtttgtaaagcgacaatgtttcatgcaaatatgagaaaatgtcatacatatatattccactggaacaccacaaaaaatcgtaaaaagtgccgaaaacccgtccttgccaccagcggtgcgaagggagtataatcttgctatgaaatagtgtcatataaacaggaggcgtcatggataccaaaaaactggaagccctgctgacggcggtggagttgggcagcttcacacgcgccgccgaggtgctgggctatacgcagtccggcctgacccacatgatgaacagcctggaaaaggatattggcttcaccgttctgctgcggggccgcagcggcgtccggctgaccccggcaggccagcggatactgcccctggtgcgggactgcctgacctccaccgccgccctggagcgcgagatatcccttatcaacacccataaggaggactccgtccgcgtggcggcctatgagtccatcgcccgtcattggttgccggagatcatccagcagtttcgccgagagcacccggatgtcactgtggacatccagatgggcagcgtagacgaggtctatcgctgggtgctggaggatcgggtggatatgtgctttgccagccgccaggacgccccgctggagtggacatttctgcgggatgacgagctgctggccatcctgccgccggagtacgacagcggggaaacggcctttcctgtggaggcctttaacggtcaggagttcctcatgccctccatgggctttgacaaagatatcctccgcgtgctgaatgagcacggcgtcacgcccctgatccgtaccactcaggtgtccgacagcgccgttatctctatggtggagcacggcctgggtgtcagcgtcctgtcccgcctggtcctccgcggccggcagaacagcgtccgcgccctgccgctggagcctcgggctgtccgtgagctgggtatcgccgcccgtccgcagaaggagctgcgccccatcgcccgccagttcatccgccaagcctgcgagatgatcgagaagatgtgacacagcgctgcgcgcgaaattaccacaacacaaaggaaatgattatgctgcaatttcaagaactcaccgccgcccacggcgaccgcctgcgcggctattaccggaactgcgactaccgcctgtgtgaatattccctgggcgtcaagctcatgtggcgggaccacctgaatccgtcctttgccgaggtcgccggctgccttgtgatccgcaactgtatcgagggcgagtacgtctatgactaccccattgccggccccgaggcagatgttgaaggcgccctgcgggccatcgagtcctggtgcgccgccaccggcacgcctctggtgctctctgtggtgccggaggacaaggcccagaccctctgcctgcgctatccccgctgccgcgttatcagcgagcgtccctggaaggactatctttaccgaacagaggagctggccgccttcgccggccgtcggtacagcggccagcgcaaccacatcaacaagttccgccgggattatcccgacgcggaatttaccccgctgaccgaccccggcgatccccgcctggccgccttttggcaggactatgaggccgagtttcacaagtccggccccctggctgtgcaggagctgtctctggcacaggagatgttctcccgcatcggcaccgactggttctgtgccggcggtatgctggcagaggggcgtctggtggctgtctgcctggcggagaaatgcggcggcacccttatcgaccacatcgaaaaggccctgtactcccatgccggggcctatcccgccctggtccaggctttcgccgcctactacggtggggactgcacatggtgcaaccgggaggatgacgcccgggacaagggcctccgcacctccaagctgcaatacctgccggatcacttgggcggcaaggtccgtatcgaggcgggcaccgagctggacgccctcaaggccgtccctgccatcaaaaccgatcgcctgtccctgacgcctctccgcaaaggcgatatccctgcgtacagtgccctgtgtctggacgacgagcgcaaccgctggtggggctacgactaccgcaccgacctgggcgatcagcccctgaccgacacctatttctacgatgtggcccgggccgatttcgccgcccgccgcaccgtcaactttgccgtccgcctgaagggcaggctcatcggcgaggtggtgctctataaccccgacttccggggcgggttcgagcagggctgccgcatcgccccggaatacgccggccacggctatggcgctgaagccttcgccgctgccgccgactgggcgctgtaccacctggggcttgcccgggtggtggccaaatgcttcaaggaaaatgagccgtcccgtaaaatgttatccgcttgtatgcgtcccagcggcgaggacgatacgtatttctactttgaaaagaccgtctgacgcataagacaagcacctccgcgcacactaggcacggaggtgctttttcatgcagtatgagacgctgaccgacctgttgaacaacgaggccgcggcctacgactacttctacgccctgtccccggagatgcagacccggctccagcagcgccgcgatatccgcgatctgcgccagctgaagcaggccgccgcggacatccagacaaactcccgtcccgccgctttctgaatgaacagctcagaaaaacagcgccctcggcatcagccgggggcgctgtatgttcatctctgatactcgaattccagatcgtacatgctgacgatgtcgccgtcctgaatgcccatctgctccagcgtgtcgaacaggccgctctgccgcagcatcttgtcgaagtacatgcggctctcgtagtcggagaagttgatgttgcccatgagccgctggagccacggcccctccaccagccaggtgttgtcctcccgctcgatgtgcagcggctcggtggtgtcgatcaccggcggcttgggcacgtactccggctcgtacaccgtcactggcggcagctcactgagccgccgggcgatgtgctgcaccaactcccgggtcccctgatgggtggcggcggacatggcgaagaactcatagcccagcgcctccacatgggcgcggaaggcatccagctgcgccgtgtccatcagaagatccgtcttgttggccacggcgatctgcggccgtgtagccagctccgggctgtactccttcagctccgcgttgatggcgtcaaagtccgcgatggggtcccgcccctcgctgccggacacgtccaccagatgcaccagcaggcggcaccggtcgatgtgccgcagaaaatcgtggcccagacccgcgccctcgctggcgccctcgatgatgccggggatgtccgccatgacgaagctgacgccctcgtccacgtacaccacacccagattggggtacagggtggtgaagtggtagttggcgattttcgggtgggccttgctgaccacactcaagagcgtgcttttgcccacattggggaagcccaccagccccacgtccgccagcagcttcagctccagcaccacgtcgtggctctcgccgggcagacccgccttggcaaaccgcggcacctgccgggtgggggtggcgaaatgctggttgccccagccgccccggccgcccctgcacagcacatagggcttgtcgtcggacatatccttgatgatctcgccactctcggcatcgcgcaccagcgtgccccgggggaccttgatggtcaggctttcgccgtccttgccggtcttgcggccgccctggccgtccacgccgttgccggccacatacttgcgcttgtagcggaagtccatcagtgtggacatattgtcgtccaccttcaggatgatggagccgccgctgccgccgtcgccgccgtccggaccgcccgccgcaatatatttttcccggtggaaggccaccgcgccgttgccgccgttgccggcccgcacggtgatccgcgccttatcgataaatccatttgccatggtgctacctcgctttatctgaaaacttgcctatctctccattttgcttctattttacccgaaaggagtaaaaaggtcaacaaaaaacctcccgccatcggcgggaggcttttcaaataccaattactccgcggggtaaacagagacctgcttgcggtccttgcccagacgctcgaagcggacaacgccgtccgccttggcgaacagggtgtcgtcggtacccttgcccacgttggtgccggggtggatgtgggtgccgcgctgacgcaccagaatgttgccagccagcacgaactgcccgtcagcgcgcttggggccaaggcgcttggactcggaatcacggccgttcttggtggagcccataccttttttatgggcaaagaactgcagagaaatgttcagcattttcaagtaccatcctttctgtaagatgatcgaggaagaaggctcacgcctccataacttcgatgttgtcgggatactcgtcgtggagctgtgccagatacaccatcagccccgtcagcaaattctgacaggtgctctcggcgtcggacgccagcccgccgggcagccgcagcgtgatgctggtctcccgttcattgaccttgacggcggcgcacagccccatcacgtcgttcacggtggcctccaccagtcgtacagcgctggtgatggcggcacagacgatgtcctcgcccgcgtcggcatagccgctgtgtccgctgacctcaaacccgacgatacgcgattcctccgtgaggaatgtcacagtggtcattgccgtctcagaacgtgatcttgccgatctcgaccttggtgtacggctgacgatgaccctgccgtttgcggtaacccttcttgggggtatacttgaagatacggatcttcttgcccttgccgttcttgaccacagtggcgtccaccttcgcgccctccaccacgggagtgccgaacttcgtgttctcaccatcgacgatggccagaacctgatcgaacaccacggcgtcgccagcattcacgtccagcttctcgatgaacagagtgtcaccctcgctgacgttgtactgcttaccgccggtaacgataatagcctgcataaccttgttgcacctgcctttccttaattacggactcgctgtcgggggcggccggacaagccggcgcttgcttacccattcaaagcggcttatcaagtataacagcgtctttcccccttgtcaacagggaaagacgctgtttttgcctgttttcgcaaaaatttcccgctttacgccgtgggataggccagtttctcctggttccacccggaaatgatctccgtatagaacgcgcagcacgtcttcgccagctccacgtccagattgcggtagttgccgcactcctttgcgctttttcctggcatttcgccctcaaataccgccccctgggcgaacacccgctgcacaagtgccacggcctgggccagtgtcaactgcttcccgtcaaacaggaaatagaatcccgtctggcaccccatcgggccgaagtacaccaccgcgtccttttccgggctgttccgcagcagtgtggcgatcacgtgctccaccgagtgcatctccgcgttggtcagcaggtcgccggtgttgggctttttgaaccgcaggtccagcgtcaccacgtctccgtcctgccggctgagatacagccccggcaccagcacgtcgtgatccaccgtaaagctggcgatacgttccatgttcagccctccagtccgtccaggaacgccatagcgaccctgttcaggtccttcatggcctccgggaagttaaaatagaaatcatggtgctccagcacgcagtcggacacggacttcagcgccatgaacggcacctcgttgcggtaacacacctgtgccgccgcgccgccctccatttcaatgagcagggggtggaaggtctccgcgatccaccgcgcccggtcacactccgtggcgaaccactcgccggtggcgacgctgcccacacggtaggcgtacccggctttgtccatggcgtcctttgccttctccagctcggcggtggggaagtctatccggttcaccgtggacaccagccccaccgggtcgccgatgcccgacgtatccacgtcgtgctgcatgaaccgatccgccagcaccagcgtcccgatcggcacgttctcaaagcacccggcaacgcccacgttgacgatccgtcccggcgcgtacaggtcgataaacagctgggtggccatggcagcgttcaccttccccacgccgccgcagcaggcgaccacgttctcccgtatccggtagaagggcacgcccgccaccgttttttccggctccgcgccctccggcagcaggctctcgatctcgcccttcatggcgtacagcaatccagtcagcatacagcaaaccctcacttttcccgttttctccattgtaaataccccggcggcagaatgtcaagttgcattttccccactttccctgtaaaataataaaaaacgaaaggagcacatcatggtcatcggtatcgtctgcgaatttgaccccctccacaggggacacgcccgccttctctcccacgcccgcgccttgggcgcggacacggtggtctgcgccatgagcggctccttcacccagcggggcagcttcgccgccctgtccaaaacggcgcgcgccgagatggcggtccgctgcggcgctgacctggtgctggagctccccacgccctgggccatgtccccggcggagaccttcgcccgcggcggcgtgcggctgctggcccttgccggggccgataccctcctgtttggcagcgagtgtggggatctgcccgccctgcggtgtctggccgactgcctggacagccccacctttgccgatcaccttaccgccgtgccggagtcgggcctgaccttcgccgcccgtcgtcaggctgccgccgcatccctgctggacaatgctaccgccgcccttctgcaaagtcccaacaacaccctggccgtggagtatctccgcgccctgcgccatacccgcagcgccatgacgccatgcacactccgccgtgagggtgccggccatgacggcgctccggagggggataccgcctcggcctcctttctgcgtgaattgctgcggcagggcaggggggagaccgcctgtgcctatatgcccaccccggcggcggacgtcctccgccgtgagctggccgcaggccgcattgccgacggcaccctctgtgagcgcgcgatactggtccgcttccgtgccatgaccgaggcggattggcgtccctacgacccaggaaacgagggcctgtaccacaggctgtatcaggcatcccgcgacgcctgcaccgtggcagagatgctctccgctgcaaaaaccaagcgctatccccttgcccgcctgcgccgtatggtcctcagcgcctacctgcaattaccgcctgcgccggagcgtgtgccctacctccgcgtgttggctgccaatgccgcgggccgcgcacatttgcgctgtttgcgggatgccggtgccccggtgctgacgaagcctgccgacgttccggcgctggggccggcggcggaggagctgttcactctggagtcccgctgtaccgacctgtatgtgctggcccgcccggacctgtcccaggccgcccccggccaggactaccgtaccacaccggtcatagtgtaaacagacgcagcccccgccaaaggcgggggctgcgtctgtattcactgctcctctaccacatagccctttcgccgcagagagccgaagatctcctgaatatgggccttgtctcgggtctccagcgacagatttaccacgcaggagccgatggcggccttggtgttgcggcgctcgtggttcacgtccagcacgtttgcgcccagggacgacaccacctccaggaacgacgccagcgcgtggggctggtccggcagcaccgtggagaagctcactgtccgcccctccttggcgaggccccgggtcaggatgcgctccagcatggtcacgtccacattgccgccggacagcagagcgcacaccgttttgccctcggtgttcaccttgtggtacatggcggcggcgatacccacggcgcctgcgccctcggccaccagcttctgcttttccagcaccgtcaggatggcgctggcgatctcaccctcgctgaccgtcaccacctcgtccacgtactcccggcacatatcgaacgtcagatcaccgggagtcttgaccttgataccgtcggccaccgtatccacgctgctgagggtgatgatctttccctccttcagggactcagccatgctgggtgcgccggcggcctgtacgccgataatgcggcactggggcctcaggttcttcaccgcgtaggccagccccgcgatcagtccgccgccgccgatgggcacgaagatcatatccacgtccggcagctgctccaggatctccaggccgatggtgccctgtccggccataatgctgtaatcgttgaaggggtgtataaacgtcagcccctgctcgtcccgcaggcgcaccgcctcggcataggcgtcgtcgtacacgccgggtaccagtaccacgttggcgccgtagctgcgggtggcctcgatcttggagatgggcgcgccctccgggatgcagatggtggccttgatgcccatatcccgggcggcaaaggccacgccctgggcgtgattgccggcggagcaggcgatgacgccccgttccttctcctcgtcggagagggtggcgatcttgtagtacgcgccccgcagcttgaacgcgccggttttttgcaggcagtccgctttcaaatagaactcgcaccccggcaccagccccttggtggggatcaccggtgtccggttgatgacgggcttcagcacccgctgtgcgtcgtgcagcatggccatggagatcataaaatgcgcctcctcattcaatataggtaaattttatcacaccgttttgctccgtgcaaggcgtatggcaaacaaaattttcaaatttgtgcgccgcaggcggacacacaggcgtttccggcgcacaccgccccaaaagtaccaaaatcgcaaaaatatcttgacttttgccgtgcttccggtataataatatggcttgcgtctgcaagcatatccttgctctcatccgagaatgagggccatttgtccaaaaggaggtgcaaaagtatggctaagatttccgccaactacgaggtcgtttacatcatcgaccctgcacagggtgaggaggctgttgccgccaccgtggcaaagttccagtccctggcagagcagaacgcgaccgacgtggtagtcgatgagtggggcaagcgtcgcctggcttacgcgatcgactacaagaccgagggctattatgtgctgatgagcttcaccagcggcccggaattccccaaggagctggatcgtatcctgggcattaccgagggtatcatgcgttccatgatcgtctgcaagggcgagtaagggagtacagcaatgctgaacaagatctttatcatgggtcgcttgacccgtgacccggagctgcgccgtacgcagtccggtacccccgtcaccagcttctctctggctgtggatcgtgattacaagacacagtccggcgagaaggagacggacttcatcgatgtggtcgcctggcgcgccaccgcggagttcgtggccaagtactttaccaagggccgtatggccgtggtagagggccggctccagatccgcgcctggcaggacaaggagggcaacaaccgccgcagcgccgaggtcgtggccgacaatgtctacttcggcgactcccgccgcgacagcgacggcagcagcggcggcaattacgccaacaacagctacggcggcaataacggcggctactccgcccctgccggcggctacgctgcgcccgtaggcggctccggattttccgagatcgatgaagaggacggcgacctgccgttctgatgtgcaaggcacatgacattttataaaggaggaaacttccatggctatggaacgcgaaaatagacccgttcgcggtgccggcaagcgccgcaagaaggtttgccagttctgcgtggacaagtgcgagtgcatcgattacaaggacgccgctaagctgcgccgcttcatctccgagcgctccaagatcctgccccgccgtaccaccggcacctgcgctatgcatcagcgccagctcaccgaggccatcaagcgcgctcgtcagatcgccctgctgcccttcgtgaccgagtaattgaaccgaaaaaaacaagaccggcggagccggtcttgtttttttgctgttccctccgtgggatttctggtaaaatagtgtatcatacagaagaaaccacagggaggagggagcgcgtggacgacagacaactgatggcgagcatcgccggcggtgatgaggccgcgcttcaatcgctgctgcgccggttcacgccgatgctgcgctatatcctgcgccccctcctgccggacgagcgggacagggaggagtgcctggcggacatctccctgcggatctggcgcggcgctgccggctttgacggtgacaaaggcagcctcaacggctggctgacggcgctggcccgcaacacggcactgaaccgcgcccgcgcccgccgcggagacgacgtgccgctggaggacaccgttccccacagcggcggcagcgccgaggacgccctgctccgccgggagcagcgcgccagactccgcgccgttatcgccgccctgccggtgcaggagcgcgacctgttctaccggaaatactactactgccagtccaccgcccagatggccgccgagctgagcctgacggagcgggccgtggaggggcggctgtatcgcctgcggcagagcctgcgccaacagttgggaggtgatttctgtgacggatgacctgcgttttgacgagctgctccgcgaggacgccgccgccctgccgccgcccgccgacggagagatcaccccgtggcgcacggccatggaccgcatcctctggggcatggggctgaccaccatcacactgaatttcctctggctggacgtgcttctgcccgccatcggcgcggtgctgctggtgctgggcttccgtaccctgcggcgggagaacgcccctctccgctggggctatcggctggcgctgctggcgctggccatccgcttcgccggggacgtgcttgccgccctgccggtggatgtggggaacgcccccgcctacgtccacatcccggtgacgctggcgctgtacgtctgtctctggcggggcatggtgggcgtgtcccgcgccgccggagccgaaaagcccgccgcccccgccgccggtgctatggccgtgttctacgcggcgctgacggcgctggcgctgatcgggctggagggctggctgctggtgctgccgctgctggcgctctatctcttcctgctgcgcagcatggtcaggctgtcccgctccctgacggacaccggctacgccatcaccgccgcgccggtgcgcctgtcggacagcgcggtgctgtggagcgcgctgggcgcgctgctggcggcggtgctgctgacggcattcctggggcagcggtatcccatggactggcatacccgcagcgacgcaccccaaagcgtgcccatccggcaggagctgctggaaaagggcttcccgtcctacgtcctcgatgacctgaccgccgaagaggtctcccgtatggccggtgccgtaagggtgtaccgtcaggtggaacgcctgtacagcgatacggaccaccgcaccatcaccaccacccactatatgagtgacccggaccgtccgctggtctacgaccacaccatcaccgacgtggatggagagggggagcgccactatacctacgtctaccgtgtctatgatacgctggagcagaccatgacccatgtggccgtggaattgccggaggaggacggtgtccgccgctatatctatatccaccacctgacctacgccgccccgcccagcccctacaccgagatgctggaactgtggccggcgtggcagacgcagggcgactggttccccggcggccatgtcagcggccgcgtcctctgcgagagaaacggcacggtgcaggccgccgccttccacacgctgaagagcggcagccaacaggtcagcgacctcttcggcacccgccagacccagcggatcaccgccggctggtccttcccccgcggcgtcgaaagcccccgcgcctacgttttctacgacgccctccgcggccaggacggctgggtcatcgagagctgggccaactacgtctgccagaccgccccggtctaccccttccgtgacgccgccgccctctggcacagctacggcagcgacgcctactccctccgccagaccgcccttcaggtattcgacggataagcacaaaaagcagcccctccggccttggccggaggggctgttcgtattttcaggcactccccctggcggaagccggggggagtgcctgtgactttactccgtcatgattttcaggatcacccggtcggtctcccgcatgccctgcgcggccagcacgcctacgttccggacggtgtcctccacatcagcgcccagaataccgtcgccggggcggaagttgttgccgccggcgtacatgtcgtagcccaagatgccgcagtccacgcccatggcgatcttgctggcgcagctggccttggcaccgtcgcaaatgcagccggagatcatggccacggcgttttccagcgtgtggctgatgccctcgcagtccgcgccccgcaaccacgcgatgccgcagcccgcgcccacaccggcgctgaccgcgccgcagtaggcgctcagccgcccgatgccggtcttctggtgtatggtgatcaggtcgctgagacacaccgcccgcaggatggtgtcgtcatccgcgcccatgagcttgccgtatttccatacgggcaccgaggcggtgatgccctgattgccggagccggatacgatgaccaccggcatttcacagccgttcatccgtgcgtccgagccggcggccgcccatgcccgcgcctgtgtcgcccagtcctgactgctctccagcagagtggagccgatgttggcgccccagctgtttcgcagcccctcggcggcgatggcggtgtttttctcgatctgccgtcccaccgtgggcaggatggcgtctataggtacagtttcggcgaatgtgatgatgtctctgacgttcagcacggacttgtcctgcaaatggtcctcggcgttgcccgtgaccggcagctcccgcaggatatctccgtcccgctccatgtagatgatgttcgtatgattgttggccacccgcacacaggcgcgatgcccctcccgccagccggtgagcttgatatccagcagacacggcgtttcgggacaggtcacgcggatgtcggtgctgtccagatacgtctggatggcagccacatccgcctccgtcacgttggcgatgacctgaagctctgcgtcggcgtcgccggccactatgcccacggcgatggcggcgtcgatgccccggcgtcctcctgtgttggggacgaccacggacttcacattcttcaggatgttcccgctgatctcagccaggatcttttccggttttccgcccaacacctcgcgcagttttgcggcacagtacgcgacggcgatgggctctgtacaccctgtggccagcaggagctcctcctgcagtatcgccgtgtaggcggcgatcttagagtcgttcagcatcacacattctcctttgttcagttgttgtattctgtcggcccttcggccggatagcccttctttacagtgcgggcacgtcatcctcctgctgcacccagtcctgcacgtccacgacctcaaattccgtctccgtcttccgtatgaccaccttgctgatacccgcgttgatcacctgcctgcggcacatggcgcagctggtggcgtcgcccagcagcgccccggtccggccgtccctgcccaccagatacagcgtgctgcccaccatatcccggcggctggcggagataatggcgttggcctcggcgtgaacgctgcggcacagctcgtatcgctctccccggggcacctgcatggcctccctggtgcagaaccccatgtccacgcagttcttccgtccccgcggcgcgccgttgtagcccgtggagatgatctcgtcgttcttcacgatgatggccccgtatacccggcgcagacaggtcgcccgttccagcaccgtctccgcaatatccagatagtagttttccttgctgatgcgccccatagctgtgtctccttgcactgtattctatcaaatattataatacatggcacccatccctgacaagcggcgtttttccccgcgatactcgtcgatacgctgaaattccgcgccaaaaactatgcaaatagccgggtgcctgcgctgcggcagcataaaaggacggccttgcagccgtccttttccctcctgcgcggtcactccgcgtttttgaataccgtctccggcgccgtgatgaccacccgcgtgttgtccgccaccgacccggtgaggaatgcgttgccgcccaccaccgagtgctcgccgatcaccgtctcgccgcccagaatggaggcgccggagtagatagtcacatagtcgcacactgtggggtgccgctttcccggcaggctggcatggcctgcccggggggacagtgcgcccagcgtcacaccctgatacagcttcacatggctgccgatcaccgtcgtctcgccgataacgatgcctgtgccgtggtcgatgaagaaccacggcccgatctgcgcgccggggtggatgtcgatacccgtccggctgtgggcgtactccgtcatcatccgggggatcatgggaacctgccgcaggtacagctcgtgggcaatgcggtatacgaagatggcgaacagccccggataggcgaaaatgatctcctccttgtccgccgctgccggatcgccgtcaaacgtggcctcaatgtccgtcatcagtgtctgctgtatgcggggcagctgctccagtatctcatgggtcagcgccgccgcggcaaaggcctggccctccggcagcgccagcgccacctgtgccgtcagcgccgtctcgatacgctccagcagcagcgcggcgtagttctccggcggcagcgccatcagctgcgcgtcaccgaaatatgccgggaacagcagccgccgaaactccttgatgatgccgatgatggcacccctgtccggcagccgcagctttttgccgtacaacggcaccgccgcgtgtgtcatattttccgccatcgccttggcgatctccgcgttggaagtcatagtccttgtctcctctcaaaataaaacggcgaaggatgcgcccgcatcctccgccgcctgtgtgtacaggtatcacgaacccctttacagggccttttcagcagaaaacgcacagcgcccatgggcacgacaacacacgcccgcgcagcaggcggacgtacaacaggcgcagtttatggtgtgcagcgtgctgttcatgcgttttctccttctccggaaatcttacataacattatactgtcccgtcccgcgcaaagtccattgtcacctttcacaaaaaccataccataccggtgggaattttgcatattcccgccgccatccggttccgccatgtcggcggctgtcagttttcacaaaaatttagcgcttttaattgcgaaagtatggtctatctaacggttgacttctgtaccccgcggcgttaagataacgccaacataaaaaacagccgaccaccggcggaaaggagaccccacatggtacgtcacatgatgcagcgcgatatgcttcataacgacatggccgcgaaccatgccgctgtctcctattatgccggcaccagctccgtctggggcttttattggtacgcctattttacctcccgataccaaatgccggctgtaaagaattgaacccgtctttcccattttccatgtgtgtgtgaagcggcttcgtctttcagacggagccgcttttcaatttaccccatcatccctgttgcccctatttcaaaacaaaaggagaagaaaatcatgactgcaatcatttcagcggctgtcatcttcgtggtgttcgccgtaggagacatgatctccgcgaaaacaaaggctatcgtatccatgctgctggtggcctccgtcgtattcctggcaggcttttggaccggcgttttccccaccaccctgtttgctgactccaccctcctgagcatggccggcctgctggtcaccatgctgctggtgcacctgggcaccaccatccggctccgcgacttcggcgcccagtggcgcaccgtcatcatctccgccgtggcctgcatcgccatctctgctgccgtgttcttcatcggccagctgatcatcgaccgcggcttcgctctggtgggcgcgcccattctctccggcggcgttgtcgccaccctgaccatgcaggatatggccaacaaagccaacctgcctgacctggcggtgttcgccaccctggtcatgtgcgcccagggcttcgtgggctaccccgtggcctccctgtgcctcaagagcgaggccaagcgcatcaaggcccagatcgacgccggcacgctccaggtggacgccggtgccgccgcggcccagaacgccgccgctgcccgcaagaagctgatccccgccctgcccgataagtacaacacccccaacgccattatcgccaaggtcattctggtggcgctgctgtccgtgtgggtgtccagcctgttccacgatgccgtcaacaagctggtctggtgcctgatcttcggtgtgctctgcaaggagctgggcttcctggatgaggacgccctgggcaaggcccacgccaccggcatcgtgatgcccatcattaccctgtccatcttcaccaatctggccgctgctaccccggagatggtgggcggcatggtggtgcccctgctggtctgcgtggtcatcggcacggcggccttctccgtcgtctccatcctcgtgggcaagatcttcggttacagctggcagatgtccatggccatcggcagctcctgcctgttcggcttccccggaacggtcatcatctccaacgaggtctctgagtccaccggcaccaccgccgaggaaaaagccgccatcaacgcccagatcatgcccaagatgctggtggccggcatggtcaccgtgtccatcacctccgtactggtggccggcgttatgagcagctggctgtgagcccggctcatttgaaaggagtgcttttccatgtctgatattcgttccttcgtcgataccatcttcgacgagttggtctctatccgccgtgatatccatgcccatccggagctgggtatgcacgaggtccgcacctccgccctcatccgcagtgagctggagaaaatgggcgtggacgagatccggcagcccctgcccaccgccgtggtggccctgatccacggcaagaagggtcccggcaagtgcgtggcgctccgcgccgatatcgacgccctgcccgttcacgaggaaaccggtctgccctttgccagcgagaccgagggcattatgcacgcctgcggccacgacctgcacaccaccatgcttctgggcgccgcaaaggcgctgtgccatatgcgcgaccagttcgccggcaccgtcaagctgatcttcgagcctagcgaggatctgatgcccggcggcgcacgggcactggtggcagccggggtcatggagaacccccatgttgacgccatcttcggtcagcacgtctgcccctctgagaatgactccgtgggccgtatgcagctctataagggctacttcaccagcgcggtggacctgttccatatcaccgtccacggcaaaagcggccacggctctgcgccccacaccgcccgtgacgccatcgcctgcgccggctacctgatcaccgtcctccagaccgtggtctcccgccgcatcgaccccatggacaccgcggtcctcaccgtgggcaccatgtccggcggcgacgccgtcaacatcaccgccggcgaagcgcggatggtggccgtcctccgcagcttcagcgacgccggccgcgacaccgccattcaggagatccggcgcatctgcaagggcatcggcatcgctttcgactgcgacatcgaggtcaatttggaggagggctacgcgctccagtacaacgaccccgccatgatcgacctggtcaacaaggccgtcaccgctgccggcggcaaggcggagttcatcgacaagcccttctccggcagcgaggacttcagcttcttcggcaagctcaccggcaccccctccgcctttatgatggtcgacgccggccgcggcgagaacgctgtctcgctccacaacggcaagatcgtgttcaacgaggaggtcatgaagcacggcgttaccggcctggccgccatcgccatggagtacctgaaccggtaattctcctatttgtttcctcacaaattggtataacagaagcgggagacctgcacagcaggcctcccgcttcccattattcctccaccggcagcgccagccgcgagcagtaccgccgcgtctcgatctcccgccccgtgtacggcgccacgatgcccagcacccgcggcgcgccggcgggcttcagcccccgcgcctttacctcccgccccagcgtcagccacgcctcgcccacgccgctgtaatcgccgtagtacagcaccgacagcacccggcacgcctccagcgtcaccgcgtccgccgccgcccggttcttccgcaccggcacgcacaccccgtagcggcacggctcctgcccgatgtatccctccagatagtccgtgcgctccgatatggtgaacagcggctcgtccgacagcacgcaccccttccgcacgcacgccccatagaagtcgtacatatcccggtatcgctccgccgtggtcagcccctcgcaccaccgtatccggcacgtaaccgccggcagctccatcatctgcaccgacaggctctcgccctccgccgcccgcagccgcatctcctccacgctccgctgcaggtcccgcagccgcgtttccagcgcctccagcagcacctcggcctcgccgccctgcgcgaaatagtccgcgatctccttcgaccccagccccatggccttgaatttctcgatctgcatgatccgcgccacgttgtggttgtcgtagtaccgccgcccgctgtccggcgcggtgaacaccggcgtcagcagcccgcgctcctccatccgcatcagcgtgctccgcgacagcccgcaggcccgtgccgcctccgtgatctgaaaaaactgttttgtgttctccgccataaaaaatccctcctgaccccttgcttcgttcacaggtgaacgggttatacttccattatagggaaaaacccactaaagtcaacaccggaggcgcacatgtgcgcctctgtcttcgcccgggcgaagacagatacccgtgccccactggaaagaccccgatatttgagaggagcgtacatcatgaaccacaaaaaattacttttgaccctgaccctgtgcctgtgtgccctgctctgcacggtggtcaccgcctccgcgtcggaagtgtcggtgcacagccaccccgtctgcggcaagacacataccgacatcggcgaccataccggcacctgtggggatgttacctggacagcttggaccggcaatgatatggatgccggaactagagatatacagcttaccactggtcactattacctctccgataatgtaactcccacatcaacaatacacattgttgggcaggtatgtctctgcctaaacggttgtaccctaagctattcggggattgtgtccagtgatagtgacagtattggtggcatgatattgttggatgacggagctgtgctgaacatctgcgattgtaaaggcggtggcagtatcgtgtacaattatgatagcagtacttggcgaaaatctactattctcgttaagggagagagcacactgaatttgtacggcggcagtgtgataaaagaaaacggtacagagactacggctgttgacctaaactattacgctggtgcgaattttcatatgtatggcggtaaggttgaaaacaggagcacccggaattcctataatacctatgcggtgtatgtgggcggaaaaccaggtgaccaagtcaaacgctctgatgtgaagctgtacgaaggagaggtcggtagtaggggctatggtattagagtttttattgcgagtcccagtattcttgttgcgggcgggaaaattgaaagcgataatacggcgatagcggtgggagatgcatctctgacactacaaggaaagccaataatcaaaacaacggaggatgattctgcggcgatcaaagtgggttcgaataatatcaaagtagaagatagtttcgcccccacgtcccctgtatctgtagagaacacaagtgagatgttcggaacagcttcctcagcagacaaggcgcagtacttcacatcctttgaaagcggaaagtttgtggcgtacgacaatggtaccctgaaatttaccgcctgcgccatcacccagcagcccacaaaagacaacagctacacggtcaagggcaacgcgcccgatagcaagctgagctaccggtggtatgcggccaaagagggcgagatcaccgtaacagacgcggttgcccgaaaaggcgagaatgctgattattataatagttggggttgggaagtaccatgtgattcaaacggagtcgactgcttcacactctacatgaacaagggagacgtgctgacgctgagcggtattaagggtggaagggttacggaagttttaatttccggcagcaaggctgaaaagcaagactcttggacctatatattcactgcacccgcggccggcgagtatacgctgaaaatcagcgccatggagtttaatatggacggcgatagcaatgtgcctgatcgttctgacttgagtttcgaggcggccttgcgaacgcttgtcccggatacgaccaagcccatgggtggaacaacggcggcgcttgccaccgccggtttgtccgctggcaaatatatttgccaggtcacatgggagggcaagagtacggtgaacagcggtgttgtccagttcagcggcagctcgcagcagtccacgggcagcggttcctactactacgccccctccacagccaaggataagaaggactctcccaagaccgccgaccccggtgtcctcctctacgccggtctggccctcgcgtccctcaccggtctggcctgcaccgccaaaaagcggcattaaaaaggtattcccccggtgtttctgaccccggcgccgggcgaatatacagcaaaggcacccctcgtgggtgcctttgccatttctccgcgcccgcaggcgcataaaaagcccccgcaaaaaaacaaaagaaaaaattacacagttccccctgaatttgcacctcatgttctgcgcccttttgacacaaagtaaccctgtcgccggcgacaaaacaaaccccgttttcacccgttcaacggcaaaaacgggaaacatcacaataaaataaggggtgagacgcttgtatgaaccacggcatatccccgcctcccatcgtctctccgcctggctgctctcggcgctgtttgccctctccctctgcgtgcagcaggcttgggccgccccggcggagcgcaccgtgatccccctgggtcaggcggtgggcatcaaactctttgcggacggcgtcctggtggtggctctggccgatggccccacgcccgcccgcacctgcggccttcgtcagggcgatatcatcaccgccatggacggcgccgctgtcggctccaccgagcaggtccaggaccttctggccgatacggccggcgcgcccattgtcctctccgtccgccgcggcgcagacgctctggccctcaccgcctgtgcccgcgaaaataacggtgtctggcagctgggtgcctggatacgcgacagcatggccggcatcggcaccctgacctactacgaccccgccaccggtcagtacggtgccctcggccacggcatcaccgatgtggataccgcacagctcatgcctctggcctccggcgccatcatggagaccaccgtcaaagcggtgaaaaagggtgccaagggcgatcccggcgagctcaagggcgacttctccgtccagcgcgatgtgggcaccgtcaccgtcaacagcagcggcggcattttcggcaccgtggccgacccggacttcctctccggcggcacgcctgtccccgtggccgctgccggccagatcaccaccggccccgccaccatcctcgccaccgtctccggcagcgatgtgcgggagtaccgtgtggagctcgtccgcctctacggcgcggacgagcccacccgcaacctgctcctccgcatcaccgaccccgccctgctctccgccaccggcggcatcgtccagggcatgagcggcagccccatcctccagaacggccgcatcgtcggcgcggtcacccacgtcctgctcaacgaccccacccgcggctacggcatattcattgagaatatgctcgacatggccggctgacagacccggtggggagggccgggaagccctccccgtccggcctttcctataaaaacgagaggagcgtttttcatgcagtccctgctcattaaggacaccacccgcgcccagcgggaggagatcgtccgccgcgccctcagcgcctgcggcagcccctgtgacggctgcaatggctgcggcaacgccggcggcggccgggtagacagtatctaccaaccctatatcgacggcgagaaggagttggcggagataaacgccgaatattccgcctcccgcggtctggtaagataaacgcaaaagcggcccgaaagggccgcttttctccgtgtgcacatatttgtcacttctgcgcctgctcctgttcataggcctgctgtaccgccaccgccagctggtcggcgcaggaggtgctccgcggcccgcaggtgttgccccgcagcagcgcctcgatctgcgccacgctcatgccgtccaccagcttgctcacggccttcaggttgccgtcgcagccgcccacaaagtgcacattccgcaccttgtctccgtccagctcgaaggagatctcccgcgagcaagtgcccttcgttctgtatatatgctccattttgccactcctttgcagaaagattacattattttcgaatagcttacaggttttttctcgttaaaactaacctgatatccctcgccgggtgccagcagatagtcgtaccgcgttccgccgaaccagtgcatcatcagtcccgacgtcaccccgccgtggatcacgcacaccgcgtcctcccccgcgtcgataacgggctgtatcgcggccagatttcgtgccagcacctgcggcgcactctctccgttggggcatatattgtgctctgagtcctcacaccacacaataaattgtggatcgtgctccagatcgccggcgtaggcccgcatctcgaaatcgccgaaatccatctcccgcagccccggcagcaccgtgtatgccacgtcgccgtatatggcccgcagcgtctgtatcgtccgcgtcattccgctgacgtagtagtgctccgccgtgggatatacgccggtcaaagctttctgctgcaaggcctccagcgatttcggcagcgccgggatatccgccgcgccataatacagatttttctggctgccctcggtctccccgtgccgcaaaagtgtcagtttcatttcaattcctccgctatcccgcagaaaacgcgcgtcacatgttccgcttttttcgccaattgctgcagaattattccatagcgctcccgccatgcccgctccgcaccgtccatgggtacaatgcccccgttgacttgtctggcgatgacgactgcgtcctcgagcagcggcaaaaaccttgtgatatcgttatttctgcggctcagcgcctccaaatgccgatagcatttgcagcctggtaccggatcggatattgccagatcgcatacgtcattttctgttaagttatatgctttcagcgcgtatgccagctttccctggaacgcgcctccaatgatcaggatcatatttacctccacaacaccagtaccgctgcaccgcctaactccgcaatggtcagggcgaagcctgacacatcgccggacataccatccagctgccggaaagcgtaccatgccgccagccaatagcacaccgccgcagccaacggagcaaagctgtcccacagcagtacggagagcccacacaccgccgccagcacaatggcggcaaataccacaggtgcgccgccgcgggtcatggcgctgtactggctggtggacatgggccgaagtgtcagaacggccagtgctgcacaggcccgtgatgccgcaggtatcagcgtcagcggccaaaggggcagcgtctccgccgacagaaataccgcccattggcacaggaccagcagcgccagacagatcaccgcgaaggccccgcagtgggaatccttcagtattcgctgccgtgtctccaggtcccggcggctcaataccgcgtcgcacacatccatatagccgtccagatgcataaaacctgtgatcagccagggagctgctgcgcacagcagagcagccagcggctgtggcaaaaagctgcccagccacgcgcacaacgcccatatgccgccgacgatcagccctatcaggggcagacaagccagcatttttcgccgggcgctctcccgccatatttttttagggcagggaatggtcaggaacataccccacgccatgaaaaagccgtatatccagtcagacacggggcagttctcctttccacaggtggggcaggcccaccgtcatctcacataccacgtcaaattccgctgccagcccttgacagatatccgccaggccccgaacataaacttccgtccagtcccggtagtcctcgccgccgtgccagatatcgtcgcacacagcgataaaatggtcgaggtaacggctgatatccagcagctcccgcagtacccgatttgctgcgccggcgtccggcgcgggaccgggaaacatctgctccgacagacaggcggtaacactgtcgaacagcaccgtgccgtgcctgtccagtgccggtaaggcggcgggcaggtcgaagctgcgctcgacggtgataaaatccatgcctgcccggtccgccacatggcggcggatacgtgccaggtcctcgtcatcatggggggtcatggtggcccaataataccgaggcgcgtccccggacagtgcggcggccaggcgttgggccatggtgctctttccgctttttccgccgccgatcagcagtatcctcatggcttgtccaccgtaaagctgtcgcctgcgcgtatttcgtccagatagtcatcctgtatggccgcctgggcaaaggtggccataccggccattacgccgcaggcaccctctaacacccggaacagcaggggacacccgctgccctcacccagccgcattcccagatgcaggcagggctccagacccagccggtctgctgccaggcggtagcccacctcataggagtcgtgggacagaaacagatagtcctgcacttcggggcacagcgtaacggcacacagtgcggccaccacggagatgaagccgtctaccgctgccggtatgcgctcacgggcacagcccaggaaagccccggccatggcggcgatatccagcccgcccacggcacacagcacatccaatacatcatccttgtcaacagcccgacgcgtcagcgcacggcgcagcacgtccttcttgcgggcgaagccctcgtctgtcagtccgccgccccggccggtgacggcctcgatgtccgcaccggtcagcgcggacagtaccgcggcagaggtgctggtgttgccgatccccatctcgccgatgcccagggcggtgatactgtcggctctggcgcgcgccgcctgctccatgccggcggccatggcggcaagcgcctccggccgggtcatagcgtcctctacggcgatgtttccggtgccccgccggatcttccggtccagaatgtctacatccggcacatcgccggcaatacccacgtccacgacggccacatcgtcgccgaaggcggcggccatagcggacatcccggtcctgcgccgggtcatgttgacggcctgctgcaaggtcacggaccggggcgcgcaggacacgccttcgtccaccacgccgttgtcggcggcaaacaccgccacgcggcagctgtccattttcgggcatacctgaccggtgatacctgccagacggatggatatgtcctccagcgcgcccaagctccccggcggtttggccagctctgcctgtcgtttccgggccgcgtccatcgccgcccggtcggccggtcggatggcctgtatatactgctgcaatgctgcttctgtcatgtcggttcctcgataaatccctgcgccgccagccagtgcagcgacggcagggcgtcctgattttcaatggtgaatgtggcatccggcgcggcgtgcagcaccgtgtcgatgatctgccgcatggggatgtttccctctcccagcggggcgtgcaggtccgtatcgccctggttgttgtgcaggtgaacgtgccgcagccatggggccataggcacgatccaatccatgggcggcgtttcgctgacgcaggtgttggcgtggcccacatccaagcacagccccaatcggggatcgtctatctgggcggcgatggacaccagcgtctccggcgacggctccatgacattttccagcgccagtgtcatgtcggccggtacgtcccgcaggaattcccgccagaaccgcaccgactgctccacataccactccggaaagtagacatggggaataaagcctccgtggaataccatgcgtcgtatacccagcgcctgcgctgcgtccagtgcctgccggaaccgccgcatggctacatcccgggccaacggatcgatggcgcaggggatcagctcggcgaaggggccgtggaaccacagactgctgataccgtgtatttcctcccgcgtccggggcagggcggcgggatcatcaagcagaggcgcataggagaaggcgatggtctccagtcccaactgccactgccgggccagcgccggggcacagctgtccatgccggagatatgcagttttccttgcagcagaggtgaggccatgttccgcgctccttttgtcgttctgcggggtattatagcatgagtcccgcaaaaagaaaagccccatagggcagcaaaaaacccgcttgcgcgggcaaatatctccggacaccataaagcggagtgccgcttggcgctccgcagatatggcaggaagagaagatgaaaaaagttttttgtttcttgcatgattaggatatcgcggagatgtgaaaaaaattcggttacaaatattaaaaatctgtgaaatcttcaacaatgttcgccgaacgatttgtattctcgccgtttttctcccgaactttctggaaaaaggtctgcaaaacgtcgcggcattcgtcgccgcacacattgcccaccagctgtggcggacggggaaagccctccataaacaaattcagcacgccgccgcaggcgcccatcacctcatcccgggcgccgtagtacacccgccggatgcgggcgttaagaatggccccagcgcacatggggcagggctccagcgtcacatacaggtcgcactcgtccaaccgccaactgcccagcgccgcattggcctgggcgatggcctccatctctgcgtgagagacggcggcctgcttttcctcccgctggttgcggccgcggcccacgatctcgtcattgcggacgatgacgcagcccaccggcacctcgccgtggacagcggcctcctgtgccagagcgagggcctgctgcatgaaatattcctgttccatagctgtcctttccgggcggacaggccgcccctgtttgaaaccgggcataaatgcgtaaactggacgtacaatattgatgtggaggggaaccctatggcaaagaagcacagcacagacccgacgctccgtgaactggagcgtgaactgtacagcaccacccaggcgttgaaggaggcctatatccgctttgactatgtctgcgacagcgagctcatcgacgcctgtatcttcgagatcaacgccctgaaagcccgcagcaactacctgctgcgccgtattaaggagcagaatggccaaagtgtgccctccggcatcccgcacgcggtgccggtgccgaagacggagccgtccgcgccgccctgtgtggctgccggcgcgataaaggggggagaggtatgtccgtcatagagatcgtatccctggccctggtgggcctgttcctgctggtggcggtggtgcggctgttccgcaagccgctgaagctggcgctgcgggtggcgctgaacagtgccctgggcctgggtgtcctgtggctactgaacagcaccgcccccgtcaccgggctgacgctgggcgtcaactggttcaacgcactgacggtgggtgttctgggcctgccggggctggggcttctgctgctggtgaagtgggtgctggtgtagttacatagggaggaaggcttcactttattccgttcaacagtctgtttgctcgttcaacagggaacttatcctccatatcagccacctcaaacaaactcaatggcaattctttttccccgaccaaagcaaggtattcctcaacagctctgcggtcgatcgtgatttttccgtgtcccgcccaatggcgattgctctcatcttttttcaaaccggtgatccaatacctatcgccattttcaacgtctatgtagtttgaactgccgcctatggccttttgaaaagcatggtcattaaaatagactgtctttctggtttttgaggtctttacatagccgatccatgccgggccatcatcggaatatccagattttaactcaatatacattaaattctttatcatcggaaaccctccagacctgatttacgagcctcacaaaagccgtttatttctccatcgtttccagataccacccgaaaaaaacgcgaagctacaactcaattttagaggcatactcttttagaatgcggttgatctcctcttcgtttttgaaaaagacatcgtcgcatcgttccagtattgcctcccattcttcgtctgactccttatcagccagcatctggtatgcatcatacgcggtcagcaaattgcttcgcagttcttcggataagacgttctccaaaatcgaaatttccgcttgcagatcgcccgtttgctcaacattaaggaaatactgatcgtgcccgccattattgacctcgctttgataggtcatcacctctgcatagggggtgtccgcacggttttccgtccacagatcccacattttattccattttttctgctcgcgtgataattcgctttttctttttttgaaaaaaccaaatactcccatctgatcaacacctctcaaaatttgatttgcgcgtcttacaaaagccgctcacttctccattttttccagatcccacccatacagcgggtagcgctgcacggcgccgaacagctttttcttcagatcaggatagcgctgctccagctccgccagcagttccttcacctcctgccggcggctgtggccgtccatgggacaggtgttcttcaccaccggcagcgccagcttcgccgccatgcggcggatgtccgcctcctgacagtacagaagcgggcgtatctgggtgatgtccgtcctgtccagatacgtcaccggctggaagcagccgatgcgcccctcgaacagcaggttcatcagcagcgtctccaccgcgtcatcgtaatggtgccccagcgcgatcttgtgtatcccccgttccgtcagcgccgtatgcaggctgccccgccgcagcttggcgcacagggagcaggggttcttttcttttcgctcgttgaacacaatgtcgtataccggtacggagatgcgggtatagggaacgtccagctgcgcgcagtagtcggccaccggggagaagtccatccccggcataccggtctccagcgtgatggcctccacccggaagggcttgggatagaatgcccgcagccgggccagggccgtcagcgtcagcaagctgtccttgccgccggagacgcccacggccacggtctctccggcttcgatcatgttgtagtcctccacacagcggcggaccagtcccaatatgtgctgcacggtcatgcctcctgaaaatgtaaattgcgatttgagaaaacgagagtataattgagaaaataagagaaaacacaagatgttcatgccgtaaatcaaatcggtgttgacaacacgccggcactgtggtataaataatcctgcgcgctgagcgcgttttctctgccccgattgtaacaagggcgcgtgaaaaagtaaagcacacattataatataaattggaggaagatcaccatgtccactttcatggcaaacaaggccaacattgagcgcaagtggtacgtcgtggatgccgccggcaagcccctgggcaagaccgccgtcatcgtcgccgacctgctgcgcggcaagggcaaagtcacctataccccccacgccgactgcggtgacaacgtcatcgtcatcaacgccggcaaagctgtcctgaccggcaacaagatggagcagaagtactatcgcacccactccggttgggtgggcggtctgaaggagaccaagtaccgcatcctgatgcaggacaagcccgagctggctatgcgcgtggccgtccgcggcatgatgccccgcaacatcgtcaccaaggattccctgaagcgtctgcacatctacgccggcgagcagcatgaccatgcggctcagaagcccgagctggtcaagtaaggaggaaaaagagaatgtatcagtctaagaatccctacaagtacggcactggccgccgcaagtcctccgtcgcccgtgtgcacctgtttgagaacggcaccggctccatcaccatcaacggccgcagcatcgacgagtacttcggtctggagactctgaagatggtcgtccgtcagcctctgaacgccaccaacaccctgggcaaggtggacatcgttgccaccgtcgagggcggcggcgtgtccggccaggccggcgccctgcgccacggcatcagccgcgccctgctgctggtgaaccccgagtaccgcgccatcctgaagaaggccggcttcctgacccgcgatcctcgtatgaaggagcgcaagaagtacggtctgaaggccgcccgccgcgcacctcagttcagcaagcgctgagtctataccgtttacctgcaaaacgccagaaaccacaacggtttctggcgtttttctttgtgctcatttgtctccatctgagatcattgctctctcttctgcaacgacaaatttgtggacaaagtgaagcatttgacgacaaatttcacgacaatttttttgctcttttaagggtgcatggctgcctttgtatccatcatacaaaggagaaaattcatgctcattccctcatggtcaaaggctcaaaaggaggccttccgtacccagcatcccacaaaatatcccatcaagcaagcgaatcacaattctcccaaagccgacgtaaagactttcgccgacctcatttatgcagcagatcgtcccgaatataagggcatagtgacaattgtgcgccggcccaaggggacaactacaatggagactgtggcaagtgttcctgcggaacaggcgggcgaatggttgtcgcagatgcacgtttcggcaaatgcagactattatatcacgaaggcgcagttcagcaaggcacagacgtgggatagtagaaacttatttgcaataaatgctatttggatagatgtcgatgcgcatagtgaaacgccgagtttcgcagaagcggagcgtatgcgctcgctgctgatccacgcgttgccggagctggcggggattcctgttccgaatataatcatttacagcggaagagggtttcatctcgtatggcttattgagcaatgcgcggctgagttaacatttatgcaccgggcggtttcggcatactatggcgaggtcatccgagacttaatcgctgggttcaagcttaccaaatattctgtcgatgggagctacagtgcgaacatagccgggttgacccgtattcccggaacgttcaatacgtattctagcacctactgcacctatgagattattcacaggcggagaattctactcactgaacagtatgatacggcggaatatcgctcaggcaaaggggcagtaatttcaaagcgttgttgtcagttcgccccctctgctgtgcaggctgcgggagagctgcgtgtaaatgctttgctgaagctgctgaaactgcgcacaaactgggagggctatcgggactactttctacttattctattctccgcttatcagatggcaggatattcaaatgaagattctgttcggctgacgctggaagccaatacagaattagaaccttctctgttagaacgtgaggtgcgctcattactctcgactgcaatgaaaaaacactacaaaatgaaaaacgcctacatcataactgcattggaccttaccgctgatgagcagactgccatcggtatttcggtcgtgcccacaggggcaaaaaagcggggcaaaaatcaggcgcgggatgcgcgtaccgctgcgaagcggaggaaggaaaaccgtgcgatcatgcggtttcatatcctcggctggagcatcggtgccatcgcaaaaaaggtgaaccgctgctataacacagttaagaagcgcatcggcgaactggcaggaaaattggaggagcttttttctgaccgtgaactcagattactttttcgtcagcgtgcgaagcgcatcgtggagaagctggagaagtgcgcagcctccgtttcattttttgaagggcttatatattatgctgatatgggcaagtccagcatgagccaatcattagtaaaacccattgaatatcaactcgaatatagcagaaatcatcggaggaatcgaggctgtaaagatatttctgcacacttacttgaaaggacgaggtgtgcagaatgaataaggcattgttatcctccaaaagcatgtgctggtgcacgccgcaggacttttttgacaagctaaacgccgaatttgattttgtgctcgaccccgcagcaacggataaaacggcaaagtgcggtctgtactatacccccgaaacggacggactttcgcaaagttgggatcgcggcggtgctgtcttctgcaacccaccgtatggtcgggaaattggcaagtgggtgcaaaaggcgttcgaagaagcacacggcggatatcccatcgtcctgcttatcccagcgcggacggatacggcatactttcacgattacatttacggaaaagcggaaattcgctttattcgtggacggctgcggttcacggatgacgagggaaacgccgccgaccccgcgccgtttccctctatggtagtgatctacaacgggaaaaactcgctgccccaaaacaacgtgtctggcacagtcccaaaggggacatgtgcctaatgccagggaggtttccaacatgcaatttgcccccattttaccgcctatgaagcccagtacgccggcagcttcgaaccgcgcagacggtgcgcagcacaccgcttaccgcgtacctgaggcgatgtttaagctgcgcttgctgacccggaacatcaatgatgacgccgagaatctgcttacgctaaacaagaaaatcgggcaggcattgatacgatttttctctgaaatgcagtccattcaacggatggcaaacgccgaattcgccgatgaggaatatgctgaggcagtggcaagggcgttagaaagtgtcattgaaaaattggacaacaacacatattggagcctcctgagaacgctcacgctcatgggcaaaattgacgcagtcagggcaggattaggcacagatgaaatgttgccccccgatgaaatatgcacgcagctctaccggaaaattgctcgtgaaacacatgcgtttgacgcttttgtcgagggaaatatgttgctcgttcggatgcctatgctgccctccatccgcgcccatggtgtaatcaatagcgggcagaagcgcgctatctttgacacgccgatgttcgtggaaacggtgcgcggagcgatgctttccgtgaaggaaaagctgcctaaaatttccaagaagaatataatgtatctcttcatttacagagatgcagctgccccacatctggactccgataaccataataccaaagcgatcaccgatgaaatctgctctcactttgaggcgggcgatgatggattttatgcggatttccgcttctttacgagggcatccgagctcctcccggcagggacatacatcacggtttcggcgatggacggcgcactccccacgcctgaagatattatcgaaatgtggacggcgcgactgcggagcggaatggatatttgaccacatattcatcacaccaccgcgagagcgttttgcgcactaaaacacggtcattccggatgccgcatttcagacaagacggcagacccgcaaacccgctgaagcacaagggctttgcagttttgcaagtgcgggaatgacaatgtctctgtacgaataggacaattcggaagatactttacccacatggcagccgcccgaataaaagggtaaattgtttataagatacggcttattcaggggcggctgaccaagattgaggagaggagcaccacaatgtatacgccttctaaaataaaaatcagtatgctgtgcgcacttgccctttgcggtcaggtgcgccgcgatgaccttgctatttttgcgcggacggctgacgcaggagttcgcacgatacgcgagctggaagacaagggtctcatcgaggacaaaactgtcgaggtgacggtgcggatcgacggaagaaaccgcccgcggatgcgccatgtctgcggcctcacaaatgcagggcttttgtttctgcttacgcatggcgcatcactctttccgtggctggcaagcgtgccgaaagaaatcgttgggcaggtcaatttgaaaggcggcagctgcacgcggcgaattccgttggacaggcggctggatctaagtggagccaattgcttttttatcgcggcaggctacgagacccgccctcttgtattcgatgaaaacatgaaagagggaaagccctcgttagcaagctgccttgcggagattttaccgccgctggatgctcgcaatgaccgcagcttctacaatgtactggagataaagagggacattctgggtaacggcatggctgcacgctttgcccggtatgtggggtttgttgtgcacggcggtatgccggcagccgtatacgtcgtgccgcaggggggactgtcatggggcacgagcgtggtgaacaaggagcgagcactgtttgacgactttgtcctcagagggatgcataccgcaaaggatatggggcacgattgtattctgctggttcgcaagccccgcgatttgagcaggacacttgccatggaacccggcaaggtggtgccgcggggtatgcgctatgtcgtgccgatgagccgggaagggatgagagatttggaatatatccaaaactggggctaccacaaattaaaggcagcgtgcagtgaaagcataagcgaggcaggctatgcgaagaacacggagaagggtacgattccggggaacgcggcaacgagaatatctacggtgtgcccgctgatagacccggttaccggcaactacatcacaatagggccgctgataacgattcacgtgctgaaggaaaatgcggcactgatgcgggtgggaaagcccatcactgttttctgctttccgcatcaaatggccttttatcgcgcggctctcggtgaagagatagatttccttctggccactgctgaaggcgaggggtgatccgctgcgcggatcacccctcgcaaagatggcagtcggctgcatatggttacagaaacattgccatgtagatgggcagatgaaggatgttatcggagcgcataacatccttagtgtaaaggatgtagctctcaccgattttcgaggagaactttgcgcggaatttgtccaatgatgcgtggctgcggtagctgccggacttcacttcgatgggggctatttttttgccctcggcaatcaggaaatcgacctccatatggttttcccgatgctccttatcgcagcgggagtagaagtagagcttgtgtccgcggcatcggagcatctgcgctaccatgttttccaaaatcatgccctcatttacgtccagcttgtcaaaaaggatggctttatacagctcgttgtctgtatagctcttatccatgaatgtctgtgtcaccagcaatcccgtgtccgccatatagcatttctgcgtggcgtggtcggcactgagggcaagccctacattggggtcggtggcgttgaagcaggtattgactaccatcgcttcgttcagccagataaaggaatcctcataggaacggaaacgtgcattttcacccagcgaactcagccgatatttcttttcctttttggatagctgaccggggataccgtcgaaaacagcatagaccttatcctcgtatccctctgcgaacttggagacatcgtcgcggtagagtcgcagaatgtttcgcttcgccatatcggaagcggcaaagtccttcccgttcaggtaggcgaggatggactggggcatcccgcctaccagcaggtactgccggaagctattcataacctttcgatgcaccgcctgacccaagggtttttgcgcctcgaatgcccgccggataaacggaacggtgacctcatcatccagtgcccacagaaattcttcaaagtccaaggggaacatctccagatgttcctcctccgatgggatgataatgtccttgacgttcttcttgagccggatgagagagcccgtttccagataatcgtagcgaccatccgccacaaggtatttgatgagctgccgtgcgcgggtgaactgctgcacctcatcaagcacgatgagggactccctgttatagagctggaccccgaagaaaacggacagcttggcgaaaaacatatcgaggtcggtgctgtcattttcaaagatatccaatacatccttcgggacattcccgaaatcaataatgatgtggcttttatactcgttttctgcgaactccttggcaatgaaactcttgccaacgcgccttgctccgtcaatcagcagagctgtcgttccgccgcttcgctgcttccacgcaacgaggtcgtcataaatcttccgcttcagcataccgattcctcctgcctttcaaagtcgtgctgttttccatagtttagcacaggtctgcacgaaaaggcaagttaaatatgtcgatatttgcacgaaacggcagaagagatggctttgctgctgcacgaaacggcgagttttcgcagagccccgctgggccatgccgcagagctgggtatagtttttctcgcacacgggcagttccgcgcctactgcgcctcgtctgaggcttccggcggcccgctgccgcacacagctctcccgacacctgaagcaaaagagtgctcctgcgaggtggatcctcgcaggagcacttcttccaagcagtccgattggcgatatgccgcgataagttccacaaggaaatggctcagatacaaaacgcggcatagagaggaacgatttttttgttgtcctcaaagccgaagtttttggcagagagcttgattgcataagcgggcttgtaggtgtccatatagacctttaagctcttggctttggtgttgtcggcagacttgacctcaatgggaatgagctgcccgtcacgctgaatgataaaatcaatttcagccccacgctcggactcccaataataggtgtggtagccgttaatggtaagctgcacattaacatagttctccgccataccgcccttgaagtcgttgatttcctcgaccatatagagaatgtcattggcggctaaatcctttttggcgcaaagcagtcctaagtcagacacataaatcttgaacgcatcaatatcacggtagttttcaaggggctttttgatttgctccaccttgtatacctgtgacacgataccagacaggcaaagccattcaatcgcattttcaaattcggaagcccgtccgcctttcttaatcagcttatattggaaacgggtattcttttttgagagctgaacggttatattgtcgtaggcaagtctggttttcttgatttcattcaagttattatacttgctcatatcattgagatagcttgcaagtatcgtatcctgcgtatggcggacaaggatataatcctttgtttcagcgaattgcatcacacactctggcatgccgccaactacaagatactgacggtaaagctgcattgcggcgtcgtgcaaggcaacgggaagcggcgtatcggtttgaaagcactttttaatctgctctaccaaattgccctcaccgagagccaacaaaaattcctccatatccataggataaagcgttttcatatcgacctttcctacggggaaagagaatttcgccctgttgaccgcaacgccgagcaagctgcctgccacgatgatgtgataatctggagcgtcctcacaaaagtatttgagcgaagtcaacgccctcccgcaaagctgtacctcgtcaaagactatcagcgttttttcctttacgatggtctgacctgcgatatgggacaaaatcggtatcagataatcggggctgatattttcctcaaaggtttcgttcagctttggattggtttcaaagttgaagtatgccacattttcatagtgggtgcgcccgaattccagaatggaataggtctttccgacctgtcttgcgccctgtaaaataaggggcttgcggtgttcattttctttccacgcttctaagaagcccataatctttctatacataagcagtcctccttaaaggtgctgaccagagtatagcagatattcgtgtaaaaatcaacaatagcgagcgagatattcgcaaaaagcgacacgaatatttttataaatctagcattattcgacgcgatgcgcgttttcttcatagctctggcacggccagcacttccgtcctcacgagcttcgtgcagagccgcatacctttgtgtgcctgagaagtctcctgattcacacaacgagaagaccaccccgacagggtggtcttctccgccgttattcactgtttaagcaacgcggttcatatcacataccatgtcaatgaatgtcttcatatcatcgacatactgataaggcgcatactccgcgtagatgtccgggctgtcgagtacaacgatttgtacgccgtctgctctcacagactccagtgtccccggtaaacacctcgcttcacgcggggttttgcagcgataggcaatacaaccctgcttatcgaaaattttggccacaacaaaaaacgtcttatcgcccatctctgcttgtcaactccttcagtttattcttaaatgcttgctccgtttggatatcacctgcatcaaacaattctcgcatgtgcagcccaatcgtttcagaactatatttatatgcgtattgatgactccaaatgttaaagcaaaagtctcggccacaccaaagctgaacctctatcgggtaagaccagctatcccgctgatagtacagatgattcgcacggtatccatcgtcaacttgtttttcactaccacatcctaattatacccaaaaacatattatacgtcaaccatcccaaacctcagttaagttcccagtaaaagcactgaacccggcattccgcctaagatgcagtaatccagaaacagctcgctacacagacatctctacctcattgaagggcgtcagagtccgcatatgggcgagcatttccgcgatgaagctgtcatcatacccctttgcccacagaaattcctcgaagtccagtgaaaacatctcatagtccgtcttgtagcctacactgttgctttcgattttcctgtagttgatgcccagcatagagccgctgcagatgacatcgaagccacaaaaaatgaacgagtttttcaagcgttatcacattttatgagcgagttttgctcatatctgcacgaaaaccgcgcagatgtgttgcggcatcagtttttcaggcaaccgatagggacgacacacacgccatccggacggcgataggcaaaatcgccggttccggtcaagaccatcaggaaggcgggcgcgttcattttatcggtatcaattttttcagccatcgctttcaggcttttcgcgccctcctcaatgagcctgtcgccgccgagcttaatttcaacgagcccgtatttcccgtttctcaaatgaataacggcgtcgcattcctgtccgtctttatctctgtagtggtaaacctctccgttcaaagcatcggaaaaaacgcgaagatctctgatacaaagtgtttcaaagaggaagccgaatgtcttcaggtcattgatcaaatcgttcgggccgatgcctagagcggcagcagcaatagacggatcaacatagtaccgggtatctgatgagcgaatcgcagtcttggagcgtagattggggttccatgcaggcatatcctctacaacaaagatttttctgagcgcatttacgtaggaagcaaccgtttcttcgctgatcgccacttcgtcgtttgtcgaaatatcctgtgcaagcaccgtattcggcacctggcctccttgatttcttgcgtaggagcgcatgagcctgcgaactctttctggattcttctgtacattgtcggcacggttaatatccgagtgtacaactgcatcatagtaatcagtcgcctgatccaaagcaatttcatcacgcatatccacagcctgcggccaaccgccccggcacacgaggaaagccaaacggtcgatacttaaatctgaacctccatctacctccgtatttccctcaaacagatcttttatgctgacttcacctgttgaatccccggattcatataggctcatcggcctcatcgtcaaccatgtaaaacgccccgtaccggagtgtgtaatctccttggtatcggcgggaacggcagaaccggtgaggagaaattgtcccaactcgccgcgatgatcaacctcaaaacgaatggcatcccaaagctttggagcaagctgccattcatcaatcagtcttggtgtcgcgcctttcagcagccgcttggggttcaactcggacatcgtgatgttctgcgccttcttttccgggtcgtccatatataaaatgctggctgcaagctgctccgcagttgtggttttaccgcaccacttaggaccttcgatcagtaccgcacctttgccttccagcttccgcatcagaatatcgtcagcaattcttttcctgtaattcttcattcgggatacctcgccttcctttgcgttagctttattatatgcactgattatggattatgcaatgttttttccgatagttggcgaaatatttttccgacgattggcggaaatttgacacgatagttggtggcacaatcccctgcaacccctctctctgcagcgtagcgtgtcacggggatgcccttcatcttggtctgctgataggcttcaaagtccacgggcaagttgcagcggttcatctcggcatcattattcgttgtccagttcttcgagcgtgtagcgtctcgaattgccccgtgtatagcccagagcgaccatcagttcaggcgcggagtcgaatgtgccggacagcccttcgcccttctcagcggcagccatcgctgcctgagtcaccgcgttaggcacttccatgtcgtatggaaaccttccttcttggacgacgacctctgcaaaagaagtaaatgcctcttcaagcgacagattatatcgggagcagatggccgccagctgctccctaatgttggtttccaattcaaaggttattgttgtcttcatccgcatcgcacctccagtaccgccactataccatgtgtaaggtgctgcaggaaagagtctcttaaagaagcaggtgatctgcgccgatggcgcagatcacctgccttgtctgttcaggtagaggagtcgtcctcgctcatggccttgtcgatggcgcggttgatgtaggcgttgacggactcgccgcgctgtgccgcgtgcgcctgaatgatttccttcttgcctttgggcatgcggagctttatttcatcatagttgttcttgacgtacttattcacagcgcgttgctgcgcttttgaaactgccataatggcctccttaaactatatcagttcagtactattctaaccgaaaagctatactgggttcaatatacaagttgcacatataatgtacccaatatttgtggactttgccaattgaatattgtccccaatatgatataatagctatagaaaacaaaacaacggcagtcacagggagcgccaactccctatgacctgcgcaggtgaagcaaccacctacacaacggaaaattccgcaccgcagggagaagtataccctatttttgaagggtttgcaagtgctctcttgccgaaagaatgctccgtatctccaacgcaccgtgtaggtatatcctgcacggtgttttgtttatcaaaaacaaaggagtacggacatggacgaaaacagaaagaacaccatcgaagtggagatgaccgaggacgattggatggagctgctgcaggtttgcattgacctgcgcgtgacgcctgacaccctgattgagtccttttgttgggaggtcatccgccaacagtcattgctgcgcatcgtcgcagacgctattcgccgggacgctgttacacgcagcgcaaagtaacggaaaggagctttaaccatggaaaacaggaacaacaaccccattgcggaagagattatccataacaaccccactgggtatggacttttcgcgggtatcggtgacaatttcaacagcgcggcgcaggctatctgcgagctggcggacgatgcgatttccaatctccgtgccaacagcgacgaccccgacctctccatgacgattgtggtgtccttcgaaaatctgggcgatgcagtgaaaatcagcgtggtggacggcggcacgggcatcaccaatttggacagtgcgctgaccatcgcctgccgggacggggcgcagacgccgctgaacgagcacggcttcggactaaagcacgcgctggcgtcctgcgacagcagccccagccagcagtggagcatccggacgcggacgaaaaaggacgcggctgccaaccagtaccgcgaggtcacggcaccctattccatgggtacgtctgaggaggaccagcccatgaaggtgttcttttaccctggtgccggcggtctgccctacccgaccggcaccgctgttaccgtccgctgccccatggcaaagttccagacggtgaagcccgaccgcaaggcggcgcagtctgatttccaccatctcgtgatgtatgccatcgaggaacttcggtatatctacgccggcgtgttggcagatacgagcatcacaatgaaggtgctggagatcaacggcggcacagagaagtgccacattctgaagcctctgcagcccacatgggaggagggaaccatgaaacggctggagaatgtcccctatgatttgggcggcggacagctgaccatccactgccggtatgggaatatcctccctaccaagagcaatgccatttactataagggcaacatggcctccagcggtgtagagctgcgcatcaacgggcgcgccattgagcacggactgttcgaccgtgtttggggcgaggctattcaccccagccagaaccgctttctggtgcaggtagacctgattacgaacaactccgccgcactgcctgccaccaagaatacaaagacgtccttctgtgaagcggacccgcgcctgaacaagctgttccgctggatcgcaacctatgtgtccgcgccgcccaaggacgcggacaccatcgaagcccgctacgtcaaggagctggcggctaagtgtgagaacaaccccgatgccctgcgggtgagccgcgaggagccggtgtttcagaaaattggactgaaggcgaaagtagacctgtttgtgggctgcgtcaatggcgtgaccatctatgaagccaaggcgggcaagacgaaggcgttggatttataccagctccgcatgtatgtggacggctgtgcgctggacaacaagcctgtggatgaggcaattctcatcgcgcggtatcacccgcctgaggtacgggagcttctggacatcctcaatgggctgtccgcgcctgatggccgtccctacaatttccggttagtcacatgggatgaggagggcatctttgtgcagcagagcgcgtgactgaggcgagggaaaagtgtgcaatggttgcacacttttgcgggaggaatccatggtgatcaaaaacgccatcaaatgcaaaaaatgtggagaggttatcgagtccgtctccctgcacgacttcaaaatttgcccgtgcggtgcctgcgctgtggacggaggacacgaatacctgcggcgttccgcgccgtcactgaatgtttttatcgacttgagcgtggtcaagctggacgaatcagacgacaagttgttttttcataatggtacagcaggtcgcggcgttgccgcggcctgctgttttatacagctcatagttgcacatatgtgagggcgaaagctcggtatcctgttttgcctttccgtgcgccgcctgctacagtaaggccagaaaaggcgggactgcttgtggatgcaaagaaaatatgctatactttgccctgtgtgattgaattcaggagggacgccatgttttatacggatgaggaaatatctgtcatcaccggctttctcaacagctatcttgtgcgtgaccgtgccagtgcaagagtaagagaatcgtatatcaggatcagtgcagggcttcaaagtcatacattgaccagggacgattatgtttggctggagaatgctctgttgtttctgcgcccgtactggtggagtaaccgcgaggatgggaaaatgctgatggatgtgttcctgcatacgcaaacattagcaaaagaagaatagcgaaaaagatgaaggatgtaccagctgatacacccttcatcttttttcatcggtttatttgcgtttcgccccttcaagattttgtcgggggtcatggccatgctgatatactctgctgggcataatcacccatcccgtgcctgctctgctccgtcctcaatgcctaatgaccttaagtacaaggctattgtagcggaaagctgccggggcgtacaggtggaaaacgcttctttgccgcgagaaccggcttatccattcatatcatcgtatccatgagtgcggccaaagctgcttgctgcgcggatgtcaagcaattccatttatccaacatctcacgctgcgcgggagtcagagccacacgaatgtcgtcctgcgcaaagaattgcgacaatgtaacaccgaaagcatcgcagatcttctcaagcgatgcaaacgatggcgtcatagattttttataccacgaggagatggtagactgtggcaggccagagcgttcagcaagctgatattccgaccatccccgtgcctcacgattctgcttaatgatttcaagaatgtctgtcacaacttcaccaccttggatttttcgtttattatactttggaaaatcgttgcattttaataattattgtcgtattatttattgcgacaataatcttgtgaaggtgtgactgctttggaagaataccgacgtatataccgttgtgcagtcatgggacagcaccccatgcgctttccgtgggggtttgacgaggaagatgaccgctgccaaaaactgaaaatagagctggcacagcagatcatggtgctgcatcagcgcggtgtgacacagtttctgaccgcctgtgactgcggcgtaggtctttacgcagccgagatcgtcaatggtctgcgggaaaccgccgaccaagacctgatgcttttctgctacacaccacacgaggaacaggccacaaagtgggcaccgtatctgcgggaacgctattttactatgctggaaaaatgcacccttatttcggtcgtgtgtcccgtgggtacgccggatgcacagctgcaagcctataggaagatcatcgaccttgccgatgtggtactatatgtccatgatgcggatatgtcagcaacggacagtggggaaaacagagcctttgcttttgctgtggagagccatacgcccacgctggtcttgcatccgaaagagctgaccgcagagtgggtcggcgagcagttctatcccagacggtcttgataaccggatgattagtcccggtcacgatgcggcaagccggatcgcgccttgcctgcaaaacaaaaaagccgtaggcatctgtgcctacggctgcatgagggatagttcgtttttcgtaaatcatatacaattcacgacccctgcgtctgcacgtctttgcagcgcatcgctttgcggcatctctgacggaatttttgacggaattaaactgccccacgtactttcaatcgggagaaagcatatactctgcaccgcctgctttttatgtgccagagaggaatgcacataggtctgtaatgtcgtccgtatatcagcgtggcccagcagctcgctgaggctcttgatgtccacgccgctttccatgcaccgtgtcgcgtaggtatgccgcatagcatgaaaatttcgatagcgggtaccgcagcgttccaacagcttccgataccggtattgcagtgtgcgaggctccattggcgtgttcgtattggtcagcaggtagttatctttttgaatattctgtgtggctgttttcaacaactccagcatatcattgggaattgccacaagacgtacagaactgctgcttttaggggattgaaccaccaaatgtgttccggaagcatcccgcacacgggcagccgagcgctcaattcgcagaaagcctgaacggaagtcaatgtcacttttgcgtagagcgcagatctcaccaaggcgcagccctgtattcagaaccagaagcacgcacagccctgtcatgtctggcgatgccaagatcttccgtgccaatgaggagatttcctgattgcaaaacacctctatcttcttgctgcggtacgcgggcaactccgcctctctgccggggcaatcgcaatggcagctcttttttgcaaccttgaagatcgtcttcagcagcacgccaacatcccttgtgctcttgcatgacaaacctctatcttgcagccgcgaaaaaaacgcagaaagtttttccgccgtcagatcacgcagcaagagcgttcccagttcagggacgatatagtgccgtatcatatactcgtaacgcccaatcgttgaggccttcagtgcgccgcggtgctcggacaggaaaaaatccgctgcctgacataccgacatttcacctgtcaacataggcttctgtggcagcgcatcttccatccttcgccgcttctcacggcaggcggcatagctcttggcataaacatacccatattccgccttgccggcaggtgttcggccgcgaatatagcgaccctcccaccggccatcttttcgtttgtaaatgttctctccgcgacgtggcatagtaatcttcccttctttctgacggtgtttgtgacggcaattaacaagatgccgtggtatcctttcttttgaacttccagatgatggaaacaatataaagcaatttgaatcgcaattcagatagttcttgctttttcacaattttcctgcattttttgttgacttttttggcaagtcaatgtatagtaaaagatggaattgcggtaacttttctgtcgtgaattgtatatgatttacgaaatacccagagcgtgtgctgacactttgcagtatgcacaaaccgcagcagcatcattcatttgcatcagacaagtaaatatgatccggtgacaccgtgtggctgtgttggtcgtaaagatctttttatgtgcaaaagatcaggcagcagcctagaaggaatttgggttagaaaccctctgcggacggcactgtgagcgcaaggaaatggtcgaagcggcgaaagctgttgggtaataccgccattgggaggaagcttctgagaaggtagatcatgtacgaaaggcgaaagccttgtggcgcgagggcaggagaattgcacggtcaaggatctttggtacacagtggcgctctctcgctgtgacgagggcaggagtatgcgctgacggattttgtcagcgttttttcttgccaaaatgtcgctggtcatcccctgagaaggggcttgtccggcgttttttcgtaataaggaggagtgttactatgtctcaacgcggcggacgtcccattgattttcaggcgtgggcgcaaaaccaaatagtcaaaagggctgtagcagcactggaagcgcgtgacgaagcatttgccgagcgaaacgcagatacgccgctgccgcagctggcgcggtatctgagccggtgcgccatctcactgggtcacagcccatcccccagcgaagtggatggcggtacgtttattgagcagcgttttggcagctgggcagccgcgatggcggcggcaaagctgccgcagcctcgttccatgcgcaagctgcgcgacaccgctcgctataaggcggaaaaggtgaagcaagaaccgttgttccgtgaggagcgaaggcagaagcggcagcgcaagctggagcaatccgagcagcgaaaacaggagcaggctatcaaaaagcgtgcggagcgggctgctaaggcagaatgggcggcgaagaagaaggcggaggctgaagcaaaggctctcaccttggcagagacctccgctgaagccgtacttgatacaatatccgcagcaattaaccccagtcaagccgagacagtctgaacggagactgtcagctttccatagggggacggggtttaagccgccccgtcccccatcctcaaatccgcaaaaggcaagtcgagacggcaaatgccgttgtcttttccatagcgggaggggtttgccggcccctcccgcatcctcaaaatcaacagccctaacggctgaaggagaattgacatgaaaaagaatctgagatatatcatcgcgttcctgctggcaattatgatgctgtcgagtctgtgcgcctgcgcccagaccggcactgccggcaatagcggacagttaggccttgactatgtgggagaggataccgaccaacccgaagaggaaaagccgtggtattcctggtttacggaggccttcagcttcggcaagaaggacacggcccccaccgcgcccagcaagcctgacagcgtggcggatttctatgcccagggctccggagatgcaccgcagggcaacaagggcaataagacagaccagacgccttctaccaccccggaggaggataccgccaacaagccgtccaactccggcgggaaaaaggatgacaataaaaaagacgaccagaagggcgaggacagcaacacccccgcgcctacccctgagcagaagcccgaaagcaagaaaaacaccgtcaccattaccattcgctgcgatacggcggtgaataatggtatgcatctggagagcaagtgggcgggcatcgtcccggcctccggcgtgatcctgccggtaaccacggtggaggtgaaggagggcgacacggttttcgacgtcctcgcctttgtgtgtgaaaagtacaagatccacatgtcctatcggggcggcacgtccagtggctgctatgtggatggcatcaacaacctttatgagtttgacggcggccgttggagcggctggatgtactgtgtcaacgactggtatcccaactacggctgcggcgtgtactttgtcaagcccggcgaggtcattgagtggaattacacctgcgaccttggctgcgatctggaaaacggagatccctacggctacggcaaggaatggaaggataaccatgactgatacccggatgcgtttcttcgggaacctgcatccggcggtcagtatggcgtacttcgtgctggtgctgggcctgacactggggtgtatgcacccggtcacggtggcgctgtcgttcctgggcgccagctggttttccatccggctgcggggctggagggcctacggccacaccatgcggtttgtggggcctatgtttctgctgattgcccttgccaatccgctgttcaaccatcggggcgtgaccatgctctttaccatcaatcacctgtggtacacgctggaggcggtgtgctacggtctggtgtccggctgctccctgtgcgcggtcattatgtggtttacctgctatcaggaggtcatgacctcggataagttcctgtacctgttcggcaagccctttcccggtacgtcgctgctgatcaccatgacgctgcggttcatcccacagcttcagcagaatcgccgcgagatccgtcagtctcaggccatgttgcaggaggagggcacgcggctactgcaaaggctgggcagtgccctgcggaacctgtcggtgctgctgaccatgagcatggaggcggcggtggagacggcggactctatgaaagcccggggctatggtgccaagcggcgcaccaccttccacctgttccgcttcgatggccgggacgctcggacgctgggcctcattctggcagtggcaggcgtctgcatcaccgcccgcgccttcggtcacgggtatatggagttctatcccgccatgacgccggtgctgctgggcagtgccagctataccatgttcgcgttctacgccgtgctgatgttcctgcccggtattcttgaaacaaaggaggccatcagatggcgctcttacggtttgaacacctgagcttctcctacccgctggctgacacgcgggcactggacgacgtctcgttggagatacataagggcgagtatgtggtgctgtgcggcccctccggctgcggcaagaccacgctgctgcgccatgccaagcccggcctgctgcccgtgggggcaagggccggcgagaccttttataaggacgcgcctctttcccaactgccggagatgaccgctgcggcggagatcggcttcgtgcagcagaatccggataaccagatcgtcaccgacttcgtatggcacgagctggccttcggtcttgagaacatggcactgagcgtgccggtgatccgccgccgtgtggcggagatggccgcttttttcggcatggagccgtggttccgcgccaagaccacggagctgtccggcggccagaagcagctgatgaatctggcctcggcgctggcgatggggccgaagctgttgattttggacgagcccacctccatgctggatccgctggcggcccgcaatctgcttgccaccgtgcagcggatcaaccgcgagctgggcgtagctatccttttgacggagcatcggctggacgaggtattccccgccgccgaccgtgtggtgaccatggatcaggggcgtatcctgtcagacggtgcgccggctgagatcgcgcagcagctgtccggaagcgtggaaaagagccgtatctatttcggacttcccgccgccgtccgtatcttcagtgagctggagcaggtggacgagctgcccctgacggtacgggacggccgccgccgcttggagcggctgctgcccatcgcggaagatactaccgtacctgaggacacaaaaaccgaaaaagaaacaaagcaccccaccgttttagagggcaaggagctttggttccgctataccgaaaagggcaaggacatcctgcggggcacggatgtaacgcttcatcagggggagctgctgtgcctgctgggcggcaacggcgcgggcaagaccacgctgatgcaggcactggccggttttcggaagccctatcgtggcaaggtgaagctggcaaaggggcagcggctgtgtatgctgccccagaacgcccggtcgctgtttgtggccgacacggtggagaaggagctactggacagcgccggtcaggacaaatccagagccatgcacatggcggagaggctggagctgacgccgctgctatcgcggcatccctacgacctgtccggcggtgagacccagcgtctggcggtgggcaagctgctgctgcgggaggccacggtgctgctgctggacgagcccaccaaagggctggacgcctatgccaaggcggagctggcgcagctgctgctgacgctgtgccgggaaggcacgtccatcctgatcgtgacccacgatgtggagtttgccgcccggtacgccacaggctgcgccttgatgtttgacgggctgctgctctccgagggcgagccccacgacttctttgccggaaaccggttctataccaccgacgccaaccgtatcgcggcggagcacttccccatggacattacctgcgaggaggtgatcgcgtcgtgtcgaagctctttgtcagcaaaagaaccagagccgccgcgtgggtgatccttctggtgctgcccgccctgatggcggccttcggctattaccatagccaccgtcccgcggtcaatccggtggggtcacgcaccttctgggactacatcatattaaactcggatattctgctgggcctgctgttcctgctggcgtccgccatccccttcatactggtattcgataagaagaagccccaggcccgtgagctggtgccgatcgcggtgatggcggccattgccgtggtaggccgcaccgtgtttgagatcatcccgctgcccaacttcaagccctgctccgccatcattatcatcacggcggtggccttcgggccggaggcgggctttcttaccggcgcgctgaccgcctttgtcagcaacttcattttcggacaggggccgtggacgccgtggcagatgttcacatgggggctggtgggctttctggcgggtattctgcaaaatgccggcgtattcaaaggcagaagccgccgtcactttgcggcgcaatggtgggacaggctgtgcccggagaataccaaccggggcgatctgctgcattttgtgcggcagcttaccgaccacgcgcccctgcggctgtgcctttacggtttcctgtccggctttctgtacggctggatcatgaacctgtatttcatcatcggctacgtcagcccccttacctggcagacgataggcgcggcctatctatccagctttttcttcgatttctgtcacgggctgtgtacgtttctggtactgtgggcgctgggcgacccgtgggtacggaagctggagcgcatcaagatcaagttcggcctgacggcggaggagcggaactatgtgctgccgccctccacatttgagatagcgagagagaactatgagtgaacgaaaaaccatcatcaggacggtggggctgaagaagcactacaccgtcggcggcaacacggttcgtgcgctggatggcgtggacatgtccgtgctgcaaggcgaatttgtctgtgtcgcaggtcgcagcggctccgggaagtccaccatgctgaatatgctggcaggtcttgagccgcccacggagggtgagatcattgtccgaggcaagcatcatttggaggctatggacgaggagcagcggacaaggttccgccgccgctatattggctttgtgttccaaagctacaacaatctgccccaatacacggcactggagaatgtggcactgccgctggccatccgaggcgtgccggaggatgaacggaactggctggcgtggcaggccctgagccgcgtgggactgcgcggacacgtagatcaccggcctgcggagctgtcaggcggtcagcagcagcgcgtcagtatcgcccgggccattattacggagccctccatcgtgctggcggacgagcctaccgggaatctggacagccgtaccggccaggaggtcatggagctgctgtgtgagatcttccgggagaggaacaccaccttcatcctcagctcccatgacccgcagatgcagcgttatacggatcgtaccgtctatttcagtgacggaaagatagagatagaaaatcaccacaccggagaggagaacgcacagtgaaaagagaaacggtaaaacgggtactggccctgttgatctgcgtattgatgacagtatccctgctgcccgccgtcgctatggcggaagaggtcacagaggatgtgatagatgacagcaccattgaggcttacacgtcttacgaaaacggagaggacgccggcgtcagcggggtctcggttacagacgaaaagcccaacacggatatcaaggtcatacccagcgacgccaacgccctgatcctgatggataccggcgcacagtcccccaaaggcgttcccggtcaggtggtgaagatcgtgctgccgctggcggtgaacaaggagtatctgcccagcgagaaatacatgctgcgcaacatcaacatctaccccgatgtgcctaccgacgccagcgtgtccaactggccctttgagctgatctacgccagcgatgtgcagcacttaaaggatatgtcctacaactccacggcggaggtgtggttcgagttcaaggtcagcgagtttgccagtaagggacgctacgctgtgccctttaagatcaatgccaccgtgtggcgggaggatgccgtgaacggcaccactatcaccgaggacgtgaccttcaaggtcagtgcctatgtgaccgttaccgacaacggcaatatgtccggcgtcactacctccttcggcagccttcaggtggcgggtaccaatgcgggcggctcctataccgtgcctaccggcacacccaatcagactatctccatgcggatccccgtgatcaatgtaggcggtaccctgaccagcgtgacggtctatcccgtggtgtccgccgcgctggacgagttccccttcgtgatcgactccaccaatttaggcaaatatttcgactactgggccagcggcgaggtgaagtatctggactacaccttcacggtgtcgccctttgccacctccggcaacaagtccattaaattcaaggccaactatttcgagaacagcgcccctgcggagggctccttctccacgcagtttactgtgatcgacggctatgacgcctccgccatgtcggtgatggtgcagagctataagctgtatgtggacgataccgaggtatccggcctgatggcaggcgaggagacggagctgcgcctgaccctgatcaacaattccaagtatgacacggccaagaaaatcatctccagcctggtattcaccaattcccccggcctgacgctgtgcgtaggcggcacggataccgcctatgccgactccatcaagccgggcggcacgacgatcctgaaatacaagatcatggccaagcaggacgcggaggttggccccgccatgctgggcatcaacctgacctatgagaccaccgaggcggtggccggtaaggcggcgcagaacatcatgctgccggtcagccagaagatggatgttctggccggtacgccggaggtgtacggcacacccagcaaggataaggaagctaccatctccgtgccgctgaccaacatgggccgcgccaaggctatgaatatccgggtgctggccacggacggcatgaccgccgccgcgccctgctacgtgggtgacctgctggcaggcggctccaccagtgccgatgtaacggtgggcttctccaagatcggcgcgtttatgggaaagatgatcctccagtatgaggacgccaacggcgagacgtattctcaggacatctccgtgcccctgagcgtggcggaaagctctgcggatacagatgccaacagcgtcaacgcaaataaagacggcacagacagccgctggtggctgtggctgctgatagcgatccttgctctcatcctgatcggcattgtggtctatgtcatcatccgctataagcgcggcgagatcggacccggtgccgaaaacaccgctgccttggacgattttgacgacgactttgacgcagacggcggcacgccggatattggagagaagccgctgacctacgacggaagcaataaggacgggaatgtatgaagccaaaagacctgtttcgctacggctgcaccaacctgttccgacgaaagacccgcacggcgctgacagccctatccatggcggtgggcgtcatgtgtatcgtggtgctgatctccgtaggtctgggctatgagcaggcgtaccgcgagagcatcgaggcactgggcagcctgacaaagatcgatgtgacgcctgccaccggcgattacgggcgcaaggcgctgctgaacgacaaggcactggaggcgttccggggcatcgacggtgtggaggcggtaacgccggtctatcagcagtccgcctatatcgtgtccggcaactatgtcaacatggtgcgcgtctacggcattgacatgaccacggcggaaaacttcatgctgacgccggagcggggcgttatggccgaggacggcacacgcctgcatccggaggtgctgtttaccgacgatgtggcagccggacttgccaacaaggcgaaggactgggagctggcggtggacgagaacggcaacgctctgattgacctgctggaagtacctgtccgcatgaccttcgattcctccagcctgaccggcgagccgaaggctgacaccgacggacgggcactgccctccagcaatctctataccctgcgggtaacgggtatctgctccaccctgaataacaacttcgccaccgccgcgttcatgtcctttgaccgcttgcaggagatgacgcaggccaacgccaattacatgggcgcgacaactcaaaccaagacggcggaggaaaaggccaacggccccacctacgacttggtttgggtgaaggtgaagaacgtcagcgacgtgcagcgtattgtcaagctgatccgggacacggggctgaacacctattcgctcaatgatatgctggagacggtgcggacgcagtcccggcagatccaggggatgttgggcgcgctgggcggtatcgctgtcctgatctccgccatctgcgtggcaaacaccatgatgatgtccattacggaacggacgcgggagatcggcgtgctgaaggtgctgggcaccgttcgcagcgacatcttcaagatgttcttgacggaagcgctgatcgtgggcgtgatcggcggcgcggctggcttggtgctgagctttatcgccaagtggctgataccggtgatcttcgcgtcccgtgagctgcggtgcgtgctgccctggtggctggcggtctgcggtgtggtgttctccggcggcgtggccattgccgccgcttggatccccgcccgcaaggcaacgctgatcagccccaacgaagccattcgctctgagtgaggtgacgatatgaaaaagacaacacacaatttcaaaaagccgctgcgcagtgccctcgccatggcactggcactggtaatgaccctttctctgacggtacaggctttcgcagcagttggtacttggccggccaccggtacggccagcggtgacaggtatttgcaaaacagtggtactttctataacggcagtgctgtaatggccccgctatatgccaattttggcggctttatcaatgtatacggcgtgccgcagggttccgatgcaagctcctatgtcatgacgccgacctccatttactttggcgacaacaagagttcaaaggataataaagctgatatagtacttaacaattcttatgatttttcaaggccgattcgctataaccttactgcagcagatggacggacattcccagtctatacctttgcagcggaggctaccagtaaggaaacgtggacagaagcgaatacccaggaactgctgggtatggcggagctgttcgcggatacctatcatcagctctatcttgtaatagataagatcaatgcggcaaagaccaatatcggcgcgtatcatccggccaatgcggatatgctcggcacactgggctactggctaggcatggataccgccttttatgacgacgatactgtcggcatgggaggcaaccgtctctttgactcctatgaagcaaagtggcgtgcgggcggcgaggaggccgttcagttcatgcaggaatacctgcaaaggtatattaccaaaaaaggctatagtcgggtcagccccgcggcactacggatcatctatgagcagatcgttccggagtatctttcctacgttgaacagaatcgcatcaaagagccggtcattgaccgggtgaccattggcggctctgtgggcagtatcgatgccgcggctcgcacggtgacggtgaagctgccgaaaaatgtagaccgttcccaattaacagtggatgttgaggtaggaactggactaatcgccaattcggtggcgggttctgtggcccaagggtctttggcctatcaggtaacaccctatgatccggcatacggcacgaaatacaatgcactgagcgccacatggcgtatcatcatcgaaacgggtaagccggacaatctagttacctccttcaccgttaccgctgatgatggcaagacccggtacgccaagatcgacgagaccaataagacgattttcctgaacctgcctgagggcaccgacctgagcgctatcacgccggtggtcgttcataccggcacggcggtcacgttagagggttcggcccttgacggcagcatttccttcgatttcaccaattccgagacgacacctctgacaatggtggtgaccaacagcaactttgctctgcgaacggaatacagggtaaccgtcacagccagaaagtcctcagagaattacatcaccgcctataagctgggcgacgcggagggcgtgatcgatggcgacaatatcgccattaccatcccttatgcaatggacttggctgccgtagagccggagatcacaatttccgaatttgcggcgctcaccgcgcctgacgctttgaaggaaggtgaaaacacttacaccgtcaccgccgaggacggtaccgagcgagtctatacggtgaccatcacccgcacggcggtggcaacgggcaggcagatcttatccttcacctacggcgcggtggcaggcacaatcgatcaggtgaatggtacgatctcgctggggctgcccgccgggacaagcaccacctttgcgccggctatccgcgtatcagatttcgccacggtcacaccggcctccggtgaggcgcgggatttcagcaagccggtaaaatacaaggtcacagcgcagaacggctccaccaccacctataccgtcactgtaacggtttctcaggagcaagcagagaatccttacaaggcggatatggagtcactgatcagcaagatcaaccagcggtacagccggacaacggcaggcgcgtgggaggactgggaatggatgaacctgggcttctaccagaagaagctgggtaatcttgacgacggcttctccatcgcggagtgcatcaagcggctggacaccaccaccaatgtggccatgaccaacattgaccgtaagatcatgacactgaccgcccgcggcatcgactgctccaagctgtccaagtacaacaacggcgagcccttcattgacgccaagggaaacaaggtagacgaccttgccgcaatcctctataactacagcggcggatataccatcaacggtcccatttttgccctgaacgccctggatatgggcaactatactatccctgaaaacgccgtgtggacgcgggaaaagctgctggagacgatcctgaaccacaagtatctgtcggacggcttcggcttggatatggtcaccatgctgatgcagtctatcgcgccctatcagaacgatccagtgtacggcgagcgggtcaaggctaagctgtgggagggctttgacattgttatggacagctttggcactgacccctttgacaacccatttggcgtccagtggggcggcgtgtatacctctgagggcgcgtcccagatcatctgcgctctttccgctatgggtgttgacgttcacacggatgtgcgcctcaacaacggaaaggacagcgtgctgacctcgttcctcaactacgccgactttgtcgagggctattttgcccacagcaacacgacgcccaagaacgccatggccacctatcaaggctgctatgccacacagtggtatctgggcttcctgaatggcggcggcgcgggacatccctattccctgtattatcatcgcttcgatttctcccgtaagctgtccaccgaggcggacattacctcctttacactggagggtaagaagggcgtgtttaccaccgagggcggagacaacatcatcaccgtgaccctgcctgccggtacgccgctgaatgatatgcacccgcagcttcagctgtctgattatgccacgatccttgcaccggatcttaccggcggcatcacctttgtgaaggataccaagaccgccttcaccgtgcaggcggaggacggcaagaccaccaagacctactatgtggtagtcaagctctcggatgaagaaaagccctccggcgcggagatctacaccgataccattatgctgaaggacgccaatatcctgcgggatctggacattctgggcaagaacatcaccactggcacggacagcacggatattgagctgctgcttgacgcaggaaaggacacctcaaatctgatgatctacgcccgcctctcctatggggccaccgcctcgccggcgctggacgggaagaagggcatgaacctgtcggattggacgaccttcaccatcacttccggcgacgggacgaatacccggacgtaccgcatcaaggccacggcacggacgcaggcgtctatctccgccttcagccttaccatcggcggcacggtctatgagggcgttattgacaacaaggccaacaccattaccgtgtccggtgtggatgacagcaatctgtcaagcacctccttcgccccggatgtgacgcttggaccggagacgctggtctgctctcctgcccccggtctggcgcaggacttttcccgcacggtgcagtacatcgtggcgggcaatgaaaaggtgctgtcccgcacctacaccgtctccgtgctgaataaggcggggcagttgatctccggcagcggcggtggaggcggcagcgatcctgtaacgccggccaccggcgcgaagatcacggccttttccgtgctgggcgtggacggtgtcatcaaccagagcgcaggtactatcaccgtaacgctgcctgccggtacgaacgtgacggcggtagcgccctccgttacagtgacggcgggcgcggtggtcagccctgtgcccggcgaggtggtgaaccttaccgctccggtggtctacaccgtgacgctgggcgaggaaaccagccgctataccgtcaccgtgaccttcgagcgcagcgtttcccagcagctttgggacgagctgggcaacaactcggatgtggcggatcaccagaccagccacaccaagcgggattggagctgagtgccatgaggaaaagaaaaactgtatttctattgctggtgtgcctgttgctgacgctggcggctggctgcgggaacgcaccccagcagccgcaggagcgcagcaggtgggatattctctccgcacggtgcggcgaggcggaatgtatggtgtccgtcaccaagaattggggcagacaggagacggggctgagctgtgtcgtgactattccccgcagcgagggcatggacgtgaccgccgtcccgctgacgctccagttatccgagggcgcgacgctggatgagactgagccgtgcatcgtatccattgacggtatgtcgctggtggtggatctgacggttagcggcccctgcatcaccgtgcagaacgagggctatacccgcacctactgcctgcggctcaaggaggcgatgggatgaagcgtatagtatgcttgctgatcgccgcgctgagcgtaagcctgctgctgggcggctgcggccagaacagcgatccgctggctatccgggagtttatcatcggcgacagcatcggcacggtggagcagcgcggcagcggaaaggatgcggaatatgtgatctgcatcacactgccgatagaaacggattttcagaactgcacagccaacattacgctggcggacggcgcgtccgtcaatggcgatagtccctgcctgaaggcagatttgggcggccgcatggtgctggatctgacgcgggaacatcgggatctgattatagagaatgggtcaagcagccgttcctacggctttgaaatagggctgagccggtaacggctcatgatagaaaagaggtgatgcatgggattacggcgttccctgcgcagaagagatcaacaaaaaattaacagaaggagaacgaacatgaaaatgacgaagaagatcaccgcattgttgttggctctcgtgatggcgctgtctctcagcaccatggcatttgccgacggcaccacgacgaccacgaccgggaaagtaacccgcacgaccgtcaattccattgacgccgtgtcctccgtcaccattggcggcaccaccgcctattatgagaaggacagcaataccggcgaccagatctatatccgcgccatggtggccggcggctccgagtatggcctgaagagcaccaacgtggtgatcaacctgagcaatgccggcgccaccatcaacggcgaccttgccttcacgggtgcgggcaatgtccgcacggcgacgaatgtgaacctgctcaacaaggtctataccgtgatcatcagcacctccgagggcggcgtcacgaccagcaagacctataagctggctgccggcttgcccaatggcgcggttgccattgcttccggcgatcctctgcgcatttccacactgcagttcggcgatgtggaggctacgttcactgctaccaacgcgcagaatcccctcatgggcaacactgtgtcgaacacggatggcaagtggaccttcgtgagctacaaggccgctgccaccatggacagtgttattagcaatagaactgcggtttctgccttcatcggagtacctaccggaagcactgcttctggcggatgcctgggtgaaacgactgtaagcggtgaggctgaggttacgctgaatctcagtgatggcactccctttgtgaatgtgacaaagggcagtgagacccgtaagtactttgtttttgccaccgaccccggtactttcacggtgaaatatggtattgattttaccgaggccatggctgattcccactataccggcaccgtaaagactgcggtggatactctgaatacgcaggccaaggaattcttcggtattaccgatggccacgcttatggtgagcgtgttgttaattccggcgagactgtgatggatatcatgcacaagtttgctgtcaagtacagctatacttccgaggtccccgagggctgcacctatatggcgacgctgaacggcatcggtgagtttacttttgggcagtactccggctggatgtataccgatggtcccacttgggtcaatggtgcggctgactttaccaagtggaacactcccgctgtgggtggcgccagctatactctgagcgcgggtgacgagatctgctggttcatttgctgcgactataggcatcatccctggggctaatgcacagggagaagataaaaaatgaacagtaaggagggcggggctttccgccccgctctccctacattagaactggagaatgtttatgaataaattgaagcgcatattgattctcggcctgatagccattttgtgcttcagtgtgatcccgacaacggttgcctatgcggactctcagccgttttccatcataggaagtgatggaactgcttatactccggtcaagacggacatcaaatatgatcctgttggcgagatatatcctactgtatattgcctgtgggttcccgaagatgttgcgaccctgacgattcgggcatcggacacctatcaaaaattgcattgcgcatgtaataaaggcggtacttccacgacagagaacggcgaaatagtactttctctatccacgaataaccacacaaagcggtgtttatctacaaaattaaaaaatatccctgatgttggtaagtatattgattccagcacggatgttgctcatttgatgctcgtgaagctatatgacgaccaagccacgaagataagctacattcttatccaagctggtgggacgaagctgattgcagaccctcagccgttttccatcacaggaagtaacggaactgcttatactccggtcaagacggacatcaaatatgatcctgttggcgagatatatcctactgtatactgcctgtgggttcccgaagatgttgcgaccctgacgattcgagcatcggacacctatcaaaaattgcattgcgcatgtaataaaggcggtacttccacgacagagaacggcgaaatagtactttcgttatccacgaataaccacacaaagcgatgcttatctacaaaattaaaaaatatccccggcgtaggtaagtatattgattccagcacggatgctgctcatttgatgctcgtgaagctatatgacgaccaaaccacggatattagctacattctgatccaagctggtggttctgccccaacggaagatacaacgcctccggaattcagtttggttgcaaacggtgtgcagcgcacaggagaaacaacagccaccgttaaatttacctccagcgaggccggtacggtttactattctctcgtttctgccgacgctgtggacacgtccggcgctggtacgccgatggtcagcggcgagaatacgctgaatatcaccggattgaccgccgatgcggcaacagtctatattaaggcgaaagatagttcgggtaatattagcgaatctacgttgaaagctgcggttcctgcctacgaaaccacttatcagatttatctgggcctttggagccatacgcaatactacgatttaggctatcgggtcgccagtgtgaccgcagacgggagacctcttagcatgagcggaataagtgaggtcgaatgcagcggcgtaaaggcgggacaaacggtcaaggtcacgctttacattccggaggccggtaaggagctggcgtcggtttccctgatcacgaatgacggaaataaaacgccgatcaacgtaaccgttgacggcacggagaacagcttcacctttaccatgccggcggccaatgtgcgcacggcgatcggtgaaagctttaccctcaaggattcttcgattgtgcggtatagtctgaaatcgggtgtttccctgctgtacagcaatgttggaaatattgaatcgaaccgtcaaggcaccgtgaccttcactgattccaacggagtaacgctgatgcaggcgcagcccggtcagcaggtaactgtgactgcgcagccggtgccgtatacggcaggcgatgtgttccatcggaaatttgtgtgttggaaggatattaagggcattgaggtcagcaccgaggatcagttgaacccctccttcacgtttaccatgccggcaagtgatgtctatttgtttgcggaaatcaacaatgtcggcacagaggtcacatggaaaacaaatcctttggacgtgacaaatgtccaactgaaaggacttagcagtaacgacagtccgtttgtctttgctgacggtgccacactgagtgctattccgttaggtgaggactggtggtaccggtacgaattcaccggctggacggtggagcgtgatggaacgacattgccggactccgaagtgagcacttcgctagtcaactccagccgcccgaaggggtcgttcggctatgcaacaaaagtggagttcaaggcaagcggcgagaaaatgaccgtcacggctaacttccgtgagcgtgcttttgccagcgttaccgccgtggcggatgcgaccatgggcagcgccaccgttaccgtgggcggcagtacccccgcagagacccaatctgttgtctacgagggccagaccgtcaccctgaccgccacccccggcgaacgctatatgctgaaaggctgggaggtcaaggatgccgataagaacgatgtgacatacaccgttgcggaggatgttgtcaacgttgccaccttcatcatgcctgccaccggcaaggacatcaccgcaaaggcgattttcaaggtagatcccgcaaaggccagcgccgcctgcgatctgagcaatgtgacgctgaatattcccggtgccaccagcgagcgcagcggcaccaagtataccatcacggttcctgccaacacagacgaagccgcgctggcgcaggcggtactgaagcttgagatctccgagtatgccacggtgaagaagtccggcgatacgggcaactggcccgctgagggcaaggcctgcgatatggagctggataaggctgccaccttcacggtgacggctgagaacggctccacgcaggactacaccgtgaccatcaccaaggcaaagagcagcgagaaggacatcaccgccgtcaagctgttgaacgccgataagtccgtgatcgccgagggcaagctcagcggtacgacgtggacgatcacgctgccctccaatacggacaaggccctgatcaacaagatcggctctgcgccggatgtctttatgcaaatcaactacaccggtgtgtctctggcacaggcagaaggctatgacgatgcgactggcatcatcggcaaatggtcctccggcaatgtcatgtgcggcatcagccccaacagcagcaaaactttcaccgtcaccgccgaggatggcagtaccaagacctacacggtggagatcaagtacaccgcccccaacgctcccaccctgtccggcggctctgccacccgcaccagtaagactgccgcaacggtgaagttcacctccaatgaggccggaacgtacttctacaaggtggttgagcacggtgcggcggcacccacggtagatgagatcatgaaatccaccacccatggtacagccagcgcaggcgagacgaccatcaccctcagcaatctgaccgaggacgcccgtgacatttacattgtggtcgtaaacgcctccggaggcgagagcactgtcctgaaggtggagatccccgcctatggcagcggcagcgaaacgccggataccggtaagtttaccatcacgattaacgcccccaagggcggcaaaatcaccaccaaccgcaccaaggcggataagggcgacgagatcatcgtcaccgtcacgcccgacagcggctatcagatggcagagggctctctgacctactcgctggctgtggcaggtggtgaaacggtgaagatcaccggtaaccgctttactatgcctgcgggcaatgtgaccatcacctgcaagtgggagacggccacaacgactgccaagggcatcaccagcttctccatcaacggtgtggccggtgcggtgaacaataccactaacaccattaccatcaccatgcctcgcggcacagatgtgacgaagctgaccccggttatcgccacaaacggcgtcaagtccctgacacctggcagcggtgaaacggtggacttcaccaatgccgtgacctacaccgccgccatggaggatggcagcagcaaaacctatactgtcacggtctacgtggacaagggaacgctggccgatcagttctgggacaagctgacggactttgccacccaagttccctggtgggagtatgcaaagcatcagcaaagcaccagcaagtatcccaagtattggtaagtagatggctcccgaccccgcagacaccctgaaataccaatcgcaaaacgaacaaaagagcagccattcctaggaatggctgctctttctctgtaatgactcaggcacgggcgtgatgggcgttggcctccccgtgtgcctgaaccccgcctacccccacggcatgacactatggggctctgaaggggctgagtgcgactgcgaaggcaattgctatacgccgcgcgactcacgaaacgtaaatacgcatttgatgtgtcagagcagggatgccagttaagcattgagccagttgtcgagaataggccgcaccggttgaataaatgaaggaagaccacttgccgaaaacagcaggtagccttcccttagatagagagtgatttccttggaatttgtccttccgaacgtattgacaatatactcgattatgctacgctgggattagggggcaggtgcgggggtacgaagttacatttccccgcctgagcgtgactgtctaggccgctggggtcactgcggagttgcggaaggcacggtgctcgtgccacttccttgctcagaccgctttttgagccccaaatctccatctgaatactcattaatgatggtagaaatttcatcgtcaacacggagaaccgtcatagaatagtattgtaggctatttcgccaatcctttctgcgaaaagtttgcttgagatcttcaaaagcttgctcgcaattcaaaatgattataatgtgtgcctttaatgcgtatgtgttagcaaatagatttaagattatgtcggaggcaagtacatcttcccctttgaagtactgaaaattccacgattcaccaccgtcttttgtgccaagattatagggcacacactcataattcctttcgccgctggtgttgttatttggcctaacaggcgtacaagttgaaagctctctcatatcaccgtctatatcaaaagtatctcgcacaaagcaggtaaggcgtgaaccataatagattaactgccaatctccaaccagttcaatcaacttccgcgtgtcttttatataccgagccaaatcaatattcaatccaagtatatacgcaactctattccattctggttttgatttcacgttgtcagtcctcagaaaacgagagaataggctggaagatagttcgaactcggttgcaatatctacctgcgagactctcggattttgttgtaggaacaaattaattacatcttttactaactgagcatctttgggaaaattgttctggtctccagtggcctctaccataaagttatagtcatcttcaaatttttctaattcttttgacagctttgcatctttgcccatatacaaacctccaaatttatttgattaatagtaccacaagaacgaaaaaaagtcaacgtaagataagcgaaatgacgtttggcagaaatgattgtattaacattttgagcgttatgatttatttttttacatctatatattgacttttattgccacctgtgttattttagaggagaagacagatagtcttcaagttatttttctgaaatgacggcaaaatacggaacggctcattcgaaatttacgcctgcggagatgctgctatctacgaaacaggaagtggctgatagccatcagagccttaagcaagaggtacgggaaggccgtctcggaatttacgcctgtggagatgccaccattggcgaagcaggaaggttgaaagaaaggccacggccaataaaaaagcacctcccgcttgccggcgggaggtgcaggatacaagacagcgagaaaccatcaagtaccagtgcaaggttattttatcatggtttctcggaaaaatcaattagaaaaggagttaccatgaattgcattttactcgaccgccgggactcggcgaaatacttagggatctcagtttcgaatcttgaccgccttcgtgcagcgggggaacttcctgctgtccaataccggcgtaagggaaacgtccgttatcgcgaggaggacttgaggaaatttattgagcagcgggttgataacgtggatcgcggcagagcggattttcatcccagctttcgcggtggcaacggaaagagggggcgtaattaatgcctcgaaggaaagagaagacagtaatccgaaacgggattgaatactattataaaagcattcgcgatgaacgtggtaagtatatcactgtttatggccggacaattgcggagcgcgacgagaaagtaaaaaagcgggaggccgagattcgccttcgtcgcaaaattaaggaattcccaaccttcagcgaacgtgcgacggagtggctctccgataagtccaaggatctcaaacggaatacctataataattacgagcaaatcatccgcacacatttcatccccgtacttggtaataagcgcttgattgacatcaccggcgaagatataaaagcggctatggctgtagcagaggcgcagtccgcgtccgtttatcgcaaggcttctatgctaatcaagcagatttttgccgatgctcttacctgtgatttgatccaggttgacccgacgacaaagcatacctttaaacgcgtaaggcacgaaaaagaggatacaggggaggaatacttgacggatgcgcgagtttccacgctactcgctgcggtcaaagatatctatcctttagaaacgttcgttaggctgggactttatgccggactgcggcgcgaggaatctctggcactccaatgggactgcgttgatctcaatgcggacactccgcagatcgaggttacgcgtacatgtattttctgccacaatcgtccggagatttccaatgtgaccaagaccgcagctggccaccgtaatatacctattccagtgccccttttcaatcatttgaaagaaatcaaaaagagcattgcctctgattttgttatttgtaatagcagtggacttcccttgagtgagactcagttccggaatatgtggcgaaagataaagcgacgcagcgttggaccggacgaatatatccgctataaacagcatggaaagaagtctcattccgtcaatcgggaagcaggccagactgctgcccacaatcccaatgtacgctatatcattgacttcccggttaaaacacacatgcttcgaaagacctatatcacaaacctgatttatagtggggtcgatgttcgcacggtaatggattatgccgggcacaagaatcccgatgttaccctcaaaatctacgcacaggccaagagcgcagaaaaacggacagagtctgcaaagcagatcaatgaggttttcccgtccgatcctaccacataactatcccccgcaggcaccatacgcacaccttaaaagacaaaatcgacgacaaatttcattcgtcaaacccgcaagtcgttgcaaatacaagggtttctgtcaagtgagcgcaagaagtacggcctgaaggccgctcgtcgcgcacctcagttctccaagcgctgagagatcaggattttacaacaaaatcgaacggaaaatgccagaaacaagaagtttctggcgttttcttgtataattgcgatttgaatgattttggaaggtttggcaaaatctggctgaaccagacccatgttaacccattttataggggctaaaaattgatagtatccctgacgatcatttcattgtcgggatcgactgccatatttgagggaggtgcaaagatgattttgaatagagatggggattcctttgaatatgcaggtgtcacatatatagaaatgcaagagaatgccaagggttccatgacgtaggggccactttatggtggaagataataaaccttgtcacttcacaaaaaaagagaggcagatatcgtaatgatatctgcctctcctgccactatttttttgctttcaggatataaagcgaaagtaaaaaaagcgccaaatgtgtaatgattaggatgaaaaaatgatattcaaaaaattcaagcttgataatcgtagtatcaaggggtgcattcaaaaggttaacgaacgaaaaaatgatttgaaatagtcccccgaatacagcaatgacacatgcgaattgcttattcctaccgcatttttctcgattttctttgtgtaataataagcctaaataatctccgacgattccgccagcaaggatcatggatatctttaaatatatatttgcgtaattatactcattacggtttgtgaagacgaaaacggccacaataagaggagcaacagataaaagcagtcccgagagttctaattgtggcaatgtagaacggttatcttcctttttgctcattttactgttccttcctgcaacctcagaagtcctgacaacggaacgttatgactggagaatcggtagatttatggttgaagcccgcccctgcatataatactgtactatgcttttccacaccaagcgggtcaatagaaccggaaatccaataacctttcacattgtgcacatagattgtatccttataagaggctgcagtcgaatacggcgctttatcaatcataaccgacgcaatagaaagtatttcactaaatccgcagggagcaagggccggaacttcggcaataaggattgaggtcaaaatagtaacccctatggatagtagtgcattttcaagaagaacattactatgctcatcatatctgtaatatgttgaataatccgaggcgcgaccataaggacacgtctgagtccaataaatctcgtagacagccataggctgaatctgtggactgacagttccgatgtttttgttattcaaatacaactcattgttgttggtaaacttcatactagctaccgttgatccctcggaaacttcaaaagtggtgccgtcactttcttgagtgacagtaatagcagaagctaccccgtcaatgtcatatgaaaacacaaccattccatcttggttcacggtcgtacctgtcaggtaactccggggaatcttcatgaaactttcaatcaattcaagaccctcggtaacctccgcgtcggacctcagaccgtgggcataggccggtgttgaacaaagggagcaggcgaacgccaaaatgagcataaaacttgttattttcttcatcaactttccttgcgtaaattttttcatggcaaaccttcctttctttctttttcaacatgatggactttttcttcttgggatagcactgtgtcgttgtttgatatcattatatagcataaattttatgctgtcaacgaattgctatatgtatattttgccgaatttgatccagccgaaggaagtggagtgttttggtgtgtacattaggattgagcttctataaaggtatttttccctaaggaaattatcaaaatgttttgcggtttgtaatcgcaaaacattttgacttttgataggaattgcggtatactatctacagacggaggtggtcatagtgatttacagacctttgtatgtagataaaatcatggcgtatcagtgattattttcgagttttacgtgcaaaagaagcgcgtagtatccctctgacacttatcacaaaataatgggtgagcagatgggttaaccgagagccggggatgccgcaaacccagtaataccaacggtttgcggacgtaagagcaaaagcagtacggcctgaaggccgcccgtcgcgcacctcagttctccaagcgctgatcggacgcaaattcacaactcaagagctcaaaaaccccggaaaatccgcattttccggggttttcttatgctcatttttcgtaaaatatgactgattttctccatcctttcctttgaccatcgaccgttttgcagagcctattatactacacaagcataaggcctatgttaagcaagaggtctttggggcgattggaacaacgaaagactggcttttactacccggttgacaaaacggaccatttcctctttgctgtacttgtcatagccctccacgacgacatgcatcaaaccgtttgacagatgggtatacatcatttccagctctgtctcactggctccgggcagttctttccgccagtaagcaatgctgtccgccttggccagggcaatcatccgcatgaggaccgttgagtttgtattccccaaaatcaggacgcggcacgccgtttgattctgatcgaccatatcgtagatggcttcgatcagcgccgtcacatcaaacgaattgacatagcgaagggatttctcaaatgcgtcgatgagttcattctcaatgctctccatcagggcaaagcaatcgctgtaatgggcatagaaggtggcacggttaagttgcgccagcgcacaaacctccttcaccgtaattctgtttacaggtttttccttcagcagcttcagaaaagactgcttgagcaccatttgcgtatagcgtttccttgcatccatcttctccatatagagcccctccaaaaaaagtttacaaagaaaagcaacgctttgacagaaagtgttgtttttctttcggtcgtatggcaagtgctgattgtttctgtctttcctctcaagtatactgtacttgtgaaagataatcaacacttgtatgattatttgaggaggcttttttaatgtatgataaatatcttgttacaggcgctaccggcttccttggcagagctgttgtagaagcgctggtacgccgcggcgcacgagtgtatgcgcttgtgctgcatgatgacccctatatcaatttgctccccaaagaagtccataccgtcatcggtgatgtgtgtgcggaaaactcgctgacagacttcttcgcggatgcggacagccgtacctgtgtgattcactgcgccggtatcgtctctgtcgcgtccagacccggttcgaagctctatcaggtcaatgtaggtgggacatggagcgttctccggcaatgtatggagcgtaatgtgggcaaaatggtctatgttagttccgtccatgccataccggaaaagccaaagggctgcaccattacggaggattgcgaattctccccggggcttgtggacggagattacgccaagagcaaggcaaccgcaacagagtttgtcttcaatgcggcagagcgcgggctgaatgccagcattgtcttcccctccggtatcatcgggccgggcgatatacagggagggagcttcacctcaatggcgaaatcgtttctttccggaaagctgccctttgccgtttgcggcggatatgacttcgtggatgtgcgggatgtggcaaaaggcattctcgcctgttccgaaaacggagagctcggcaaaggatacattttgtccggccactatgtcactatccgcaagatgcttcagcacgtgggaaagactgcaaagctgaagtatcgccccatctgcctgccactggggcttgcaaagctggcggctccatactatgaacgtcgaagcatgaaggagcgaaagccgctgtttttcaccccttattccgttactgttcttgcctcaaacgggcaattcagtcatgccgcagcatcggaatgctttgcatatcatccgcgcccggtggaggatactttgcaggacatgacagcctggcttttggggcagaggagaacggacgaagtgtgacctcaccgcaacaaaaagcaccttgagcaggctgcacatgcaactgatataaggcggcgcggcgcagtacatcgcctacgccctgccggtgctgctggtagcggcgggaagatggtccgttttccgcttatcgcagaggaaataaccgaacatttactccctgagagctgctttttggcggctctcaaatttttttgaaaaattttgcgttttgggtgagagttttttcgattttttgtacctatataagtgaaggggtttttaagccgcatttcaaaaaatccagaaaggaggttcaaacgatatgtacgataccgcaagacgggtcgcactcgtcaagcagcgggtgcgggaaaacacccgccggaggcagcggcgcgaggtaataagtctctccgcagcgtgtatgctgctgtgcgcggtcttgacgcagacggcgggcacggtcgtcgggccggggcagaccgccgcatggggcagcttcggcgcgatgctgctgcgggaggacgcgggcggctatgtgctggtaggcgtcgtctcctttgccgcggcggcagcgatcaccgcgctgtgcttccggctcagaatcagagaaaaccagaaaaaagacgggacggacaaaccgaaccgacacgaacaggaggagaaaagccaatgaagaaacgaatacttagcatcctgctgctgtgctgcatggtgctgacgctgcttccgacaacagtattggcggcggacgggccgatggataccataccaaagtacgacgtgagcattgacgtgtacaaccggacatcggacatatccattaaggacagtcggagctactacatctactcgtccgttcccgataagctcagggacacatgggcatgggataagaagatattcatcaagggagataaaaccgcgccgcacgtatttattgacggcgtaaatatcgagatgagtcccagttccaaggggccggctattgaattaaataagaaggcttcggcatatatctatttcatcggcaagaacagctccctgcaaggtgccgacggccgcgcggcaatacagaaaaaccgcagcgagggtcagctttatgttctggcgcgcacaggcaccacggtgacctgcaagggcggcgacaaagcggcgggcataggaggaagctacgcgacccgcaatatttccaacggttattacaacggagatatgtacggccacggcgtgaatatgcactttggctctcggagcaatcctgactactggggcggcaccatagcggccatcggcggcaatggcggcgcaggcatcggcggcggccagggcggaagcggtgagaaactgtatttctactccggcacggtgcaagccaacggcggccgcttggcctccggcatcggcggcagctataagggtcgcggcagtgagatctatatttatggtggcacagtcagcgctcaaggcggtgacggaggcgctggtatcggcggtggctgctggacaacggagcaggacatgaatggcatcaacgccgcccacgatatctacatctccggcggcacggtcacggctaaaggcggccacaacggcgcgggtatcggcggcgggcagtatgtccccgcccgtgatatcacggtgacgggcggctttgttacggcgacgggacactacggagcggcgataggcggcggccgctggtgccgcggaatggacataacccttaccgacgctaccctgaatctgtcgaccaattaccgcagcaacggctcggacgcggcggctgtcggctacggcgacattgtttacaaaccggagcagctcgtggcggatccgtcgatcgcgacgaacgaccggataaaggtcggctcaaaggatggaaagatcgtcatgctgacggctaacggttacgcgctcagaacggatgggaaaccgagctacttcatgcatctcactgatttcctgattccggacagcgacggaatgattgacctgtcactgctgactctgccatacacgcagaactacggatgggcgataactgatcttgatgtgaaaatgatggagacctcctgcgagggaaaccatacctacggctggaaaaaccggaatggctgtcatgtctggggatgcacacgctgcccggcccggaatccgctagagcgtggacctgtaccggatggtgagcatattcccggagagtgggaaaaccaggaaaagaagtgcaccgtatgcggggttgtgtcggcgaaggacaccacgcctccggtgaccgagggaattgcgaatggaatggagtataccgccgacgacaccgacgacgggcagcccggtacgatcagcttcacagtcagcgacccggtgagagacaaggaggtgtcctccggcgtcaagtctgtgacgatcaacggtgaggagcagaccgtgcagaccggacaggcttatcagctgaccgcgccggacggcggcaacaatgacgaaggacttgtgtatgaggtcgttgctacggataatgcgggcaacagcaccacaacaaagataactctgtacagaaggcaccgggtcctgatcctgagtgacagaaacgacccgagcagcacgatcctccaccttggcgtgccgcacgggtctgaactggaactgccgttcgatcatctgccgaaggaagcctattttgtcgactgggataacgaggacatcaaaataagccgcggggagaataattactataacctcggcatcatcaactcgaaccggacgttccttcaggtgattccggagactgaactgccaacgctggagttagggctcagaagcaggcgcttctggggctatcacgcagactcggagagcgatttctgctacgcggatatgccgtcaaagactgaggaaggctatcttatggatatccgcgtcacatcaaacaaaatcggctactacttcggatcgccggtacgctacacgcaggagcagctgaaagcactggatgcagagggcaaaatcaagtggacgcagttcgacacgacctcgctcctgacattcgatgtgatttcctatgaggaatataacggaagctggtactactatgcgaaagcgacaaacgaggtggggacaagatacgtttcaacgccgaacatcatcatagacgccgacccggcggtggcgctggaatatccctccggcaaggaacttaccggcaagtatgggcaaaccgagagcggtacatactggggcgatctgcaattcaccgtggttgatgaatcggagttcaccgtaaaggacgggagtacgcctctggagccggatgagaatggcgtctatacgataaaagcggacatggacgagggcataaagcacgagatcgttatcatggacgccggcaacaatagaactgcgtatatcaacgagatacgtatgaacacgcttgaccgcagggataatccctctgccctgaatctaccgaacggtgcgaatctggaggaaagtctcccgaagacggttcggattctcacggcaagagacagctctatgtttaccaatatccctgtgatatgggaaataccagagacgtatgagcaggcgtcaaagcgggagcagagctttaccgtgaacggaacgcttgacctgtcaggcacagacattgtcgtcctaccggagcaggaatccttgcagactgttacggtagaggtgacggtggccggtgcgccgcagtacagagtaacggctacgagcagcgaaaatggcacagttacggtgacaaattttgcgaaaaccgccgaggacggcacgcctctgttctgcaaggacgagtttgtcatgctctccattgcacccgatgagggctatatgctcagcgcgctatccatcaacggcacccctgccgccgttgcggttggggaggatacctataccttcgcccagccggaggaggacgtcaccataactacaacgtttgaaaagcgcaacgagcataccgtcacctttgacgcgggcgatggtacgtcctctgtcggcagcatgaccaccaccaatcagaagctaagttcgctgcccagtgcctcccggagcaagcacagcttcaacggctggtacaccgaaaagaatggcggtacgaaggtcacgacggataccgtattccatgccaaaaccaccgtctacgcccactggacgtataccggcggcggctactactatccgcctgtcacctactacacgctgcgctttgaaacaggcggcggcagtgatatttccagtgtgcagggaacgtacaatgcctacattgacctgacccaatatgtccccacctggcgcggccacacctttaccggctggtacagcgaacgcagcctgacaaacaaggtttccggtgcttatctgacgaaggatatgaccgtgtatgcaggctggcgcgtgaccacagtcccgcagaccggcgacagcagcgtgttaggcttgtgggggttctccctctgcacatctcttgccggatgccttgcactgaccacatggcagatcaggcggcgacgtcaggaaaaatcactgcaaatcatcgaaaagtaaacaggctcaccttcaggggcgcgggcaaatagccccgcgccccattcgctgtcttcccagaaaaagacggctgttcctcaaaagaacagccgtcccgtttttttctgctgatatgtatctgaaatcagaccacaaacaggtacaggagatatctacaagtctgtttgtcagcccatatcggcggatagagccttgctgatttgggcttgcagtgcctccgcctgattcttttccgtaacagcgcccacgatggggtcgcccacgatgttgccgttcctgtcaaccacataggtggtgggataggcaaagatattggtggtgaacttgccggcctctccatcggaagcaaaatacacgttctgataggtcgcgcccttcttggcaagcacatccttggcctcggaaatggccgtctcgttgccgtccagcgtgaaggtgttgacaccgatgagggcgccgcccttctccgcaagctccttgttcagcgcgtccagctcggcaagctctcccacgcaggggttgcaggtggtaaaccaaaaattcacaacggtgacggcgtttttggcgaacagctcgctgctcttcaccgtgttaccgtccagatccttgccctcaaaggcgggaaacttctgcatactgccatcgtcaggcggcgtggtcatatcgctgcccgccgggacgctcgtattgtcatcgtcatcaggcgtctctgacagccagggatacttcgtctccagctccgcccgttggttctcaatatccttgatcttggtggcctcgccggtgagcagcgtcagttcctcctcggtgaactgatccttggcattctcgatggtcttgagcagaaaatcgccgtagttgccgccgtcctctatcatggccatgcccttatcggctgccataaagaccttttcccaaagagctgtgttttccgacaggatggcattttcctgcgccatcagctgctcgtacagcgcctttgcctcctcgccgccatcattgccgtctgtgtcctctgcgggctttgtgccacaggcgaccataccggcggccagcaccagcgccagcagcagtgtgatgattttctttacgttcattttgtttcctccgtttttaatgtatttgcaggttctacaggttcttttttgccgtctccaaagccgtagcggaaactgacggcgttggtgggacaggcgcggatgcacatcccacagcggatgcactcagtatggttgggcgtttttgtcacgtccacatccattttgcaggccttggcgcattttccgcaggagacgcatttgttcctatccaccttcatctggaacagggacaccctgttaaacagcgcgtaaaacgcacccagcgggcacagccacttgcagaagggccggtaaaatacgatgctcagcacgatcactgccagcaggatgctgaatttccaggtaaacaggctgcccagcgctgcccggatgccggaattggcaagggacagtgggatggccccctccagcacgccctgggggcagagatacttacagaagaaggggtcacccatgcctacgtcgttgacgagaaacgccggcagcaggaagaccatcaccagcagcacggcgtacttgaggtacgtcaggggcttgagcttttttgttgagagcttcttcgtggggatcttatgcagcagctcctgaaaccagccgaagggacacaggaagccgcagatgaagcgccccagcagtactcccagcagaatgagaaagcctgtgatataataggagaagctgaacttggaggaccccaccaccgcctgaaacgccccgatgggacaggcgccggaggccgccgggcaggagtagcagttcagccccggcacgcagacggtcttgcccgcgccctgatacaagccgcccttgagaaagttcggcaggtgcaggttggtcaataaggccgcccccgcctgtatccagccccgaaaacgggccaaaagatgggacgcgcccgaagtattcttcttatccaatgcccacacactccaaacataatttgatcgctttgctcagcaccgtggcggcctcgccccgccagacaccgaagcacagcatggcggctcccgccagcagcagcgtgacctgcgctgctgccttcttcctgtgactcattttgatcaccctttcctgtttctgtggcctatcatagcgcaggtgggttaaaatctctgttaagaacagaaatttaacacaaattttatccggctctgctataataggagacaacctgttcattaaggaggcgactatgcaccttttgattgtagaggacgagcgcgccctgtgcgacaccgtcgcccgcagcctgcggcggtcggcctacagcgtggattgctgctacgacggcgagaaggcgctggagctgctggaaacggagcggtacgatctggtgctgctggatctgaacctgccgaaaaaggacggaatgacggtgctgcgcactctgcggcagaccgacagagagacacctgtgctgatcctctcggctcgcggcgaggtggaggataaggtgacgggtctggatgccggcgccaatgactatctggcgaagcccttccatctggcggagctggaggcgcgcatccgcagcctgaccctgaggcagtttacccagcaggatgtggtgctgcgctgcgggcagctcacctttgatgcccgtgcgcgggcagtttccgccaacgggcagcccctgacgctgacccgcaaggagacggggatcctggaatacctgatggcgcatcaggggcggcctgtgagtcaggaggagctgatggatcacgtctgggacaacagcgtggacagcttcagcaactccatccgcgtccacatctccgccctgcggaagaagctgcgcaccgcgttgggctacgaccctgtccgcaaccgcatcggcgagggctatctgatgggaggggacgaagaatgaagcggctttccctgcagtggcgcatcactctgatgaccgttctgctcatcggcatcacctgcgtggccatgaatttgctgctctgttcctccggtgtgtactatatggacaccattgcagacagcttacagggcggcggcacggtgatcctgaatgagggcggcgcggcaagctttgacccgcagctcgttgcacccagcgaggagctgaccatcgttgtcgatggggcgcagggacgcttccgcaccaccaactggtacatcacagcggcggtaacgctgctcagcggcatcctcgcctatttcgtcagcgggcgagccctcaaacccctgcacagcttcgcctctcaggtagagaaggtgcagctgaacaatctggcggatgtgaggatcgatgaggacgtgctgccggaattccggcagctcagccactccttcaaccagatgctggagcggttgaacaacgcctttaccgcccagcggcagtttaccggcaatgccgcccacgagctgcgcacgccgcttgcgctgatgcaggcgcagctggagctgttttccgcagagcacaccgatgtgctgccggagacggcggagtttctcctgcttttgcgggagcagacggagaggctgacgcagatgaccaaaacgctgctggaaatgagcaatttgcagcaggtggcgcggaacgagcagattcagcttatcccaatgattgaggagatcttcacagacctcgccccgctggcagaaaagcgcggtgtcacgctaaaagcggagggcgacggcgttatgaccggcagcgacgcgctgatctatcggctgatcttcaacctgacggagaacgccgtcaagtacaatcgccctggcggctcggtgtgggtctgcgtcacacaggagacggaaaaagtcctgatccgcgtttccgacaccggccgcggcattccggaggaatttcagcggagcatcttccagcccttcttccgggtggacaagtcccgcagccgggagtacggcggcgtggggctgggactttcactggtgtgggagatcgccgatctccacggcggctgcgtccgggtagaggagagttcagatgagggcactactattgcggtggagctgccggtacagtgaagctgcatctcacataaagcaataagccgcgcagcgggagcacccttcgggcgctcccgccttatcttagcattttgaatgactttgtattttcccaaaggcccccgcttcggcggggcccttgtcttttcacctttcgtttcccgctgcgtaggatagactgtacggagccgcccggctccgcatactacggatacggaaaagggagtgtctatgcaatcatctgtccttcaggggatattgctccccttctggggcacgtcgctgggtgcggcgtgcgtattctgcctgcgaagagcgccctccgccgttctgcgccgtgtgctggagggcttcgccgccggggtgatgaccgccgcctcggtgtggagcctgctgctgcccgctatcgactgggcggacatgggccgctggtccttccttccggcggcgggcggtttctggctgggggtgctgttcctgcggctgctggagcgactgctgccggaggctgttaccgaccgttccaccaccttgacccttctggcggtgacgctgcacaacatcccggaggggatggcggtgggtgcggcctatgccggatgtgtggcggcaggagccgccacgcccgctgcggcgtttacgctggcgctggccatcgccatccagaatgtgccggagggcgccatcgtggccctgcccctgcgtaccgccggtgcggggaaggggagagcctttctgggcggtgtgctctccggcgtggtggagccgctggccgccggcgtgacggtgctggcggcggcgctcatcgttccggcgctgccctggctgcttggctttgccgccggggctatgctctatgtggtggccgccgagctgctgcctacgcgcggcgaccccggcccgggggcgctggcttttgccgcgggctttaccgtaatgatgatcctggacgtggcattggggtagggaggagggttgacaacggccaattcctgtaatataatgtcgctgacaagtaaataaacagtctgttgatccaatgtcgccggcggccgtacagcccaccacgggccaggcgtcggcatagaaggaaaggggtagccaaaccccgcacgaccggtactgtgagcgcaaggatgcaccgaagcggcgagagccgccgggacgaaagtccgccattgtgggtaagcccatgagaaggtaggctgcaaacgaggtgggatggctgtcccccgcggcgcgagccaggagaattgcattgtgtaggacatagttgcagcgggcgcgctctccgtgtgcgggaaccttgtaccaccatgtagatgtaccacgctggcctcctgaatgggaggtcggtgttttttgcaccgcctttttcgcggccggcccttttgggcgggcggcgggggcggcgacgtctttccgtggcgcaggggtcgtatctattgcgttcgctgtccggctttgcgccgggcagcgtttcatttttgcgggacagagtgcactctgtcccgtttttcatgccctgcatgaaaaacatttcccttgccaggctgacacgctgccatacacagcgaagcggtgcggaaaactcgactgtcaagctgaggcgccgtgcgctttccatctgcgcagtgaaactgtacagatgggtcccctttgtcaagcggaggcggccattggccgcgtgcttttccataagtggggcggggatgttgccgcatccccgcccaccccctcacgtcgacaaaaaatttacataaaggagaaagagatatgaggaagagagtcataagctggctgctgaccgttgtgatggtcgtcagcatgctgcccacctccgtgttggccgacacgctggccgcggatcaggagcagcagacccagcaggaacagatagctccggtggacacggagaacaccgtctctgccgggaatgaggagacgcaggagcagcaggagcagcaggagcccgctgaggaagtgcctgtgtcccggtctgcccgcagcggcggcgcggcgctggcgctggcggaaggaactgtcagctccgcgaaggattttgccgagatggagcccggcggcaattatcaattgacggcggatatcaccgtcacggcgccctatgccaaggattttaccggcacctttgacggcaacggccacaccgtgacgctggcacttgagaatgaagcaggcgaatgtcaagcgctgttttcaaaaattgcggcttccggcaaagtccagaatcttgggattgcgggaaccgttacagggaaaaaatatgttggcggtattgccggaaaaaatgcgggcagcattgagaattgtaagaataccgctgcaatcaaaggtgccagtgctgatggcagatggataggtggcattgccggagaaacctccaatggttccaagattttaaactgctacaacattggcacgatttccagcgatcgaagcggtaagggtgtgtgtttgggtggtattgctggaaatgctcccagtgcaaaaatcagcaactgctataatgctggacagatagtaacaaagtccacgacaaattatggcgcaattgctggttatggttatggcgttaccgtttctaactgttattttattgctgttgacaacctaaaaggtgtatatggtactgaaacggagtctactccaaaatccgccgaggagatgaaatcccccgcgtttgcagccttgttaggcagcgccttcatggccaagaccggcgactatcccgccctcagctgggagacccccaccgcggcggtgacgtttgccattcagcccgagaatgctgtgcttacgataaacggcggcacttataccggctccaccaccgtggcgctgcctgccgccgatgcaccgtattcctataccgtgtcctgtgacggttacaccacaaaaaccggcaccgtgaccgtgaggaacaaggataatcccgtggctgatcctgccaatgttactgttacgctggcggaggacacctctgcttgggtgaacgtgaccttcaatgtcacgcccacgggtgcggccctgaccgtcaagcggggcgacatgactgttgagccgcagagcgacggcagctataagctgctgaagggcgtcgagtatacctataccgccgtcagtgacgacgggggctatgagcccgccgccggcaccgtgacgcccaccgagaacagcacccaaaccgtggcgctgaaaaaggtgcagagcatcgaggtgaccaaggctcccacaaagacggagtactacaagggcgatgccgaacttgacctgaccggcatggtcctcacggtgaactatgatggcaccaatgaaacccgcaccattaccgatggctatgacgccgccggtgtgacgtttgaagggtttgacaccagcgagccggcggaatcgaaaagtattaccgtcagctatagaggcaagaccgcgagctttgcgatcgaggtcaaggacaagctgcaattctccgatttctttagtgccatcagtgacagcgtcacggcaacgaatagtacgtcccgtccatttgagccggtacaatctgagggatgcctacaaccggcaagtaacgcgagttcctattccccctcaacgataacgattgcggctatcaagaatgtaactgtatcttttgactattgcggcggtacaggttatacggacttctatgtcaaaaaaggcagtagtcaactgttagcctcctattatagctccgagtggaagaatttttctgctgatctgagaattggggagacactgacgctgagttatggttcctcaagcggactcaagctcaaaaacttcaccgtctccccgctgtacacgctgaccatagcgccgaaccagacggacgcgacggtcactctgaaagataaggaaggcaaagccgtctccggcagcaatggcgtattcgccgtaaaagccgcggcggactacacctacaccgtcaccaaaaagggctatgagcccgccaccggcaaggtgaccatgagcgccgaaaatcaaacggtcaatgttacccttgtcaaactgccggtcattaccctgcagtttacccccgatgatgcggcggtaacactgaaacagggaaacaccaccgtttacaaggagtctgcggacagcgaaaaaggcaagaatgtctatatcgctgccaagaatacggcctatacctacaccgccaccaagttcggctatgagacggccaccggcacgatcagtgttgcgaccaccgatgtgaacaagaccgtcacgctgaccgagttggcaaagcagacggtgaccttcaacatcaccaagccggagggcgtgagcgccgagcctgtcgtcaccgtgaagtacaacggtaccaaggtgtacgagggcagcggcacgaactgcaccctccccgccgggaactatacctacacggccaccctggatggctgcgataccttgtctgggagttttgtggtccaggctgccaagaccataggcctggagttcgtcaagtcgctgacctttgacgatttctttgccggcctggacggtatcaccgccgagaacggcacacgatatggctttgaaccggtacgggctgctggcgggaactacctgcatcgaaatgacagcgtaagttacagcaataatacagccacgattaccctgaaagctgataaatcgcttgtgctgcagtttgattattacggaggtacgtattatagcagcagcgagtatttttctgtaaaaaagggaagtaccgagatttttaagtcatataacagcaatgagtggaagacatatagtgtggcagtggctgcgggcgatgtgctgacgctgacatacaaaggatatggggaaaacagctatgtcgatctgaaaaactttaccgtttcccccgtctacaccgtctctctcaatgtcaccggcgcggaggattgcacggtcgccttgcaggatgccagcggtgcagccatcaccggcaccgacggtaagtatgcggtccccgccggagtgtacacctacacggtcagcaagttcggctacgagactaagacaggaaccatcaaggttgaaggcggggacgtgtccaaggatgtggccctcactgccctgacggcgtaccaggtgaagtttgcagctgatccggcggatgcgtctgttgcgctgacccaccccgtgggcggcacgatcgcagcagacgagaacggcgcatacatcgtctacgccggcgagacgtatgcctataccgtcgccaaggcgaactatatcacggtcagcggcagctttaccgctgccaaaaacgacaccatcaaggtaacgttgacctatgccggtgcgggctgggacggcacgaccaagaccgcgcccaaaacagaaaacggtgtctatcagatcggcaccgccgcggaactggcatggtttgccgatgcggtcaacggcgggcagagagatatcagcgccaaactcaccgccaacatcaacctcaacgacaagacctggacggccatcggcaccagcagcaataagttcgccggcaccttggacggcgataattacaccgttagtggactcgttacaaccggccttgtgggggaacttgcagagggcggcgtagttgaaaatctgcgtgtgaattgcgcgattgtcagtacctcgtcgcttttgggaggtgttgccaattccagtgcaggaacgatacggaactgcatggtcagtggtagtatcacattctccagcaatggccctaatgctgcattagcaatcggaggcattgttggacggaccaccggaaacagcgtgattagtggctgcgttagtagggctgtcgtcaaggatgcttacgataacagcacatatggtacaaccgcacctttgggaggcattaccggatatgcacacggtgttgtcgagaactgctattttaccggtactctcgcggtaaagaagacgcagccgaataagattatctatcaaaaacgcggcggacttgtaggcgaactgcaagctaatgcagagctcaagggttcctatgtggcaggagagttcgcaatagcagatgagagtaagttcggtgcggtagttggcgtggttgccagcagcgccaccatcaccaactgcgcttatctggacaccatcgcaccacaggccgtggcggaaggcagcaccagcggtatgactgcccgcaccgcggactatatgcgcaccccggaatttgcggcggagatggggatgcaccttgacagcgacaacagcaacggcggcttcccggtgctgccctggcagggcggcacccccgtggacaatgccgatctcaaggccgctgccgccgccgccaacgccttgcagcttcgcggcatgagcgccgccgacgccgccaagaaagccaaggccgactggtacgccgagaatgtgctgggactctataaccttgagaactataacgataaggccgacctctgcgagaaatacggcatcgaagagcccggcgaagcggtcacgaacccgcacgactatttcctgaccgccctgcaaaagcacttctataaggaactggggctcgatgccgagaatgcagaccttctgaaggccgatgcctccggcgtctatcagctccgcggccttaccccggtgagcggcgacccggaggaggaagagagtgcgcagacctataccggcttcctgaccctgcccgcgaacgtcaccgtttccgtggagggcgaggaaaagaccgtttccctcgcatggacggcggataacgctctggtgaacaccgccaccggcgcgctcaccgcgcctgcgaaggataaggtcacggtgaccctcaccgccacgctccgaagcggcgcggccgcgaaggtcaagaccttcaagttgtgcctttggtccgagaatgcggaaaaggtgcagaccctggaagacattgccgccgagttcacgcgcaagaatattgccgtgcagcccctgcaaggtgtgggactctatgatgaaaccaacatcaccgacgccttctgccgcctgctgagggaacagggctatgcggatgtggcggacaaggccgagatcacctatgtcaacggcagcgccaaggccaacggctttgacggtaccaaggtacagtacattgccgacaacggcgacatcacctacttcaccggtgacggcaccgcccgccagaccgtgcagtacacgggattgaagttccgcatcgcctatgccggggtcaccaaggagatcatcctgcgaggcaccgtgggacgcagcgccgatgctgtgcagcagctggtggagagcgccgccgagtccctgaactgggaactcatccgcggcgagaataccaacggggccacccaaagcgaggtggcgggctggacgctctacaccgtgaacgaccgcatcacctccaacctcacgcttccctccggcattgcggggcgctatgatgtgaaggtgcagtggggcacccggaacaccgagtggctctacatcaccaacggcaccaacggcaccggcgtgggcaccgtcaaccgccccctgcagcccgccgacggcacggcgctgcccgagaaggccggcaagttccggctgatcgcccgcgtgacctatgacgccttcgatgactacacgctggcgcacatcaccggcgacaacggcgtggaggtctatgccgatgtgctctttgacgccaccgttgcgcccttcgacagcagcgtgaccagcgagatgcaaaacgctctggcggagaagtatcaggggctcctgcgtgactttgtggataagacaaagcccgtgaaattggatgccgtcagcgacgatatgcagatgcccagacccgctcttctggaggaaaagggcatcatgagcgacagttataaccagaaggtcacgatggtgagcctcacccccgatgtgctggacttcaacggctatcacgccatggtctaccgcccgctgcccggtgaggagccggcggaggcgaagtatgtggtcaccatcaccacccgcagctccggccttctgctggcgcggcaggagtttaccttcaccatcgcgccctttgaggagcaggaactgaaggatgccgccgactttatgaccgatgcgctgaccgagaacgcctactggaacggcatcaggaacaagaatacggataagaccaaggtcacctccgacctgtatcccttcgcggagatctgcaaaaacgaggacggcacgctgaaatacgtccgcggtacggtgaatatgaccttcgacggcatcgaggccgacgatatccccggctggtatgcttcggagaagtaccgcaccttctattcctcccgccccaccgtcatcgagcatgagctgctgcgggtgcaccagccggagtacaatacgacagttaggctggacagcgtcctgacctacaccaagtacgcccagtactgggagaagttcggcatcaacggcaccgaggagaccaaggaacgctacaaggactttgcccaattctacaagcagcccatccacatcgacctgacggtgtccggcaccacggaacagaatgaccccaacgaaaatcagaccctcaccgtgaaggtcaaggtggacggatacaacaagaacggccataccttcacgggaatctccgactttaccttcaccggcaaggtcaacgaggatcccaccgcttgggacgctgtgaaggcgtgcttggacagtgccaactacacctataccggcagcggcacctacatcaagagcatcaccgatgcggcgggcaacaccctcaaggagaagggcgacggcaagtcctccggctggatgttcggcctcgccgtcaagggcggcaccgagaccttgcccaagaccacgctggacaacacctatctcaaggacggcgacaccctgcgcctgttctttaccgacacctatattccgctggacccgacggatcccacggtgcccggtacggaagtgcccggcttcgatgaggcgtatgccggcgccaaggcgtatatccaaagcgcggtgagcgccccggtcgtcagctatctcttcggcgaatgggcggtactgggacaggctcgcgccggcgtggagctgtccgatgcatacattcaggcctactacgataaggttgtggcctatgtaaaggcgaacatcggctctgacggcatcctccggaaacccgatgataaaaacacccccgtcatcaccgacaatgagcgtattgccctggcccttaccgccatcggcaaggaccccgccaacgtgggtggcaaaaacctgctggcagcgctacaggacaaggatatcatgaaggtcaccgataccagttacacggatatcaacggtctcgtcatgggtctgctggcgctcaacagccgcaattacacctccgacacctcctggctggtgcaggccattctgggccagcagaatgcggacggcagctggagcgccagcgccgacagaaaatctgtcggcgacgtggacatgaccgccatggcgctacaggcgctggcaccctactataaggacggcggcaatgaaaccgtgaacaccgccgtggagaaagccctcaactggctctccggcaagtatcaaagcggctacgactcctccgagagctgcgcacaggtggtcatcgccctttccgccctgaatttggatgccaacacggacgcgcgctttaccaagaccgtggaggggaagaccctgagcgtgctggggaacctcctgcagtaccgcgtggcgaagaacggcggctttaagcatcagttcgcagacaaggccgtcaacgagatggccacggagcaggcgctttgcgccatggccgcctatgcgcgctttacggagaaggccaacgccctctacgatatgactgacgccgcctgcgcccatcgcttcggcgagtggaaagtgaccgtggccgccacctgcaccaaggacggcgtcagccgccggatctgctccatttgcggcgccgtggaggaaaagtccgttcccgcgccgggccacaagttcggcgcgtggacgaccaccaaggaacccacctgcaccgagaccggcacggagaagcgcacctgctccgtctgctccaaggaggagacccgcgttatcgctgcgttgggccacacccccggcacggagatgctcgcagacaaagatggccactggaacgtctgcaaggtttgccatgcggtggtcaacaagaccgggcacacctatgtgaacggcatccagtgcgtctgcggtgcggtgaagtccgagggtggtacgctgaagcgcatcgaggtatctgacacgattacagtgcccgataccctgcgggataacgagaagctgaacagcgtggaaaggatcaaagccgagctgcagctgcagatcacattgaaaaacagcaagggcaataaggacaacaccgttttcatggatgtgtcgctgctcgtattcgagaacaacgagtggcgtcctgccaccaaggaggacctgacagccggcaagatcacagttttgctgccctacccggaggccgtggccgccaagtacggccagtataacttcaccgtggcgcacatggtcgccatggcggactgcggcctggatgtgggtaccgtggaattccccgctgtcaccaaaacccccagcggtctgctggtgacgctgaccggcctgtctcctgtggccatcagctggacggagtccaccaaccactattactacaaccccaccgcgacgccggacaagaccgactctgccaacacggcggacgacagtcagatggtgctgtggctgggcagcgcggtcctggcggcggcagccgttgtggtgctgacccggaagaagcgcgtttccaagtaacaacagcacagccgacgcaggggcgcgaaagcgcctctgcgtatggcgcttttatgaggaatgagagatatgaagaaaaaccatcgattttggctgttggcgctggcgctgtccctgctgctgacctgcgccgcctgcggaaaaaagaccgtatcgtacgcccccggcaacattcccacggcaacgcaggagcagaccacggacaccaggaaggatgacacagctgaaacgggcaccaccaaggctgacggcaagcaggacgcggcaaagactgaggataagaccgcggacgataagaagcctgacaagcagaagccggctgatgatgccaaaaaggccgaggaggacgccaaaaagcaggaggaagccaagcgcctggaggagcagaagcggctggaagaagagaagaaacagcaggaacaggagcagccttctgcgccggacccggaccctgcgcctgcacctgaccctgcgccggcggcgtccgtatcgctgtacatttcctgtgccacggtgctcaataatatggacaagtgctccgacggtgtgaaggatatcattcccgccgacggcgtgatcctgtccaccacggtgaccatcaccgagggtgagtctgtcatgtccgtactgaagcgggcctgcggtgatgcgggtatcccggtgagctccagcggcagctatgtcaggggcatcaatggcctgttcgaaaaaaatgtgggcaggagctccggctggatgtactgcgtggggggaaccttccccagctatggcgcggacagctatacgctctccggcggcgagagcatccagtggctctatacctgtaatatgggtgcagacgtgggcaatacctatatgggctgacaaaagggcggcttttgccgccctttttccgcacgcaggattgacgtatcccctggcggcagggtataatcaaaaggttaagacatcatgtatgcaggaggtgatcccatggacgatacgctgcgcacttgccatccggcggtgagctttgcctatttcgccctggtcatcgcctgcgcgatgctgctgatgcacccggtgtgcctggttctgtcgacgctgggcggcgggtggtatgttgcccgtctgctgggcggcaagggcctgcgccgccacctgctgtggctgctgcccatggccctcttggcggcggccctgaacccggcctttgtccaccagggcgtcaccattctggcctacctgccctccggtaatcctttgacgctggagagtctgctctacggtctggccgccggcgccatgctgggcaccgtggcgctgtggttcgtctgcgtcactgatgtcatcacctcggacaaggtggtgtacctctttggccgcgtcatcccggcgctgtccctgctgctgagcatgatcctccgctttgtgccccgctttgtccggcggctccgtgccgtggcccaggcgcagcggcatctgggccgtgatacccagaccggcgccccggcccggcgcgtcagaagcgcccttcgtgtgttctccatcgttgttacctggagcctggaaagcgggctcattaccgccgatagtatgcgctgccggggctatggcctgccggggaggacctccttctccctctaccgctttgaccggcgtgacggtgccgtcgccctctggctggccttctgcggcttgtatctgctgggcggcggtctggccggcggcctgcgctttcagtattaccccatgctgctcagcggccccgtcacaccgctgacggtcagctttttcgccgtttacggcctgctctgctttacgccggtgctgctggacgccctgtcccggcgccgctatctcgtccggaaaggagggacgccccgtgcctgaactgctgcgtttggagcattttggcttcacctacccccagcagccccgccccgcgctggcggatgtgtccctcacggtccgtcagggcgagttctgggtcctctgcggcgcctccggctgcggcaagaccacgcttctccgccagctgaagcccgccctgcgcccccacggtgcggccgagggccgtatcctcttcgacggtcagccgctggatgacctgccgccccatcggcaggccgctgatatcggcttcgtcctccagtctccggaggagcagaccgtcaccgacaaggtctggcatgaactggccttcggactggagagcctgggctgcgacacgccctccatccgtcgccgcgtggcggagatggcctccttcttcggtatccaggactggttccataggaaagtggatgagctctccggcggtcagaagcagctgctggccctggcttcggtcatggtgctccaaccccgtctgctgatactggacgagcccaccagccagctggaccccattgccgctgccgactttttgcagactgtgggccgcctgaaccgcgagctgggcatcaccgtcctgatgacggagcaccgtctcgaggaggcgttgcccctggccacccacgccgccgtgctggacggcggccatctcctctgtgccggcgcgccggaggcggtgtgccgttccctgcggggccgcggccacgatatgttcctggccatgcccgccgccgtccgtatctgggccggagtggacagcgacgcaccctgccccatcactgtccgcgagggccgcgatttcctgtccggctggtgcgatgaacaccccctgtgcccgctgccgccggagccggtgcatcccgccggggataccgcccttgccggcgcgggtctctggttccgctatgagccggaccagccggacgtggtccgcggtctggaccttcaggcccgccggggtgagctgctggccctgctgggcggtaacggcgcgggcaagtccaccaccctgggcctgctgtccggcgcgctgacgccccagcggggcaccgtgacccatacgggccgcgtcggcgttctgccccaggacccgcaggctctgttcgtgaaaaacacggtccgtcaggacctgtacgagtcctttgacggcacggacctccccaaagaccaacgtgaccgccgggtagaacaggtgacggccctttgccgcctgaccgagctgctggaccgtcatccctatgacctctccggcggcgagcagcagcgggccgccctgggtaaggtgctgctgcaccagccggatatcctgctgctggacgagcctaccaagggcctggacgccgccttcaagcagtcctttgccgctattctttccgcgctgaccgccgccggcacgacagtggtgatggtcagccacgacgtggccttctgcgcccggtatgcccaccgctgcgccctgtttttcgacggcagcatcgtcgcggagggcacaccccgtgacttcttctccggcaacagcttctataccacctccgctaaccgtatggcccgggacgtctgcccctgtgccgtcacgccggaggaggtgatcgcggtcatcggcgggaccgtcccgccccagccggaggtgcccgccgcctggcagcctctgcctccggtggcggaggagtccaccgcctggaagccgaaaaagctcccctggtggcgcagagccatcgccgccgtgtgcggcgcgggtgcgctggcgatcttctggctggcggccaaacacaccgacctcaccgccctggtgggcggcggcacgctctctcaggccggctggcaggccctgggactttacggcctgttcatcgccctgctcttcggctgcatcgccgccatcggccggcgctccaagcccctgacgctgctccagaccccggtgcagaagcgaaggctctcccaccgtacccgtctggcggcggcactgatcctgctgtgtatccccgccacgctgtatctgggctttttttacctgggcaacactgcctactaccccatcgccttcgccgtgctgctggaatgcatggtgcccttcttcctggtgttcgagggacggaagccccaggcccgtgagctggtgctggtggcctccctctgcgccctgggcgtggcgggccgcgccgccttcttcatgctgcctcagttcaagcccgtcctggctctgaccatcatctccggcgtggccctgggcggcgagaccggcttcctggtgggcgccatgaccatgctggccagcaacgttctgttctcccagggtccctggacgcccttccagatgttcgccatgggcatcatcggcttcctggcgggggtgttgttccgccggggctggctgcgccgcagccgcgccgccctgtgcgtcttcggggcaatctccgccgtgctcatctacggcggcatcatgaaccccgtctctgccctgctctacgcccgcacgctggagtggaaggtcatcgccgcctactatgtcaccggctttcccatggactgcgtccacgccgcagccacagttttcttcctgctggtgctggcggagcccatgctggagaagctggaccgcatcaagatcaaatacggcctagtggaatgagcagacgcgcccaccccgacggggtgggcgcgtccgcgcggtgcaacttcaggtttcccacctttttttccgctgcaacccaaggctgatagacaatctgcccgatctgctgtataatagatccaaacacacagaagggaggaccgcctatgcctgccatccgctgcaaggcctgcggcaagacctatgattcccgtgagggcttctgccccaagtgcggcgcctataaccgcccgccccgccgggagtgggtggacgccggcggcgacgtccactacgccgaacaggagaaggtctgctacgagcagaaggagtgccacgaagagaaggtttgctacgaaaaccagacccgccgcccccggccccatatccagtggcgcgcgcccaagaagaacaccgcttccggtgtgataggcgctgtgatcgcggtaagcgtcctgatcgggcttatcaacacgctgcgcggcgtgtccggtgacatctttgaccgcaatgagccgatgcccgactacggctgtgagcaggtagcacccgccgaggagatcgaagccgcggtgcgggagtacgcggagataggagcgagcttctatctggaggattctgccttcgccgtggcgagtctcaaagcggactgggagagggatgtcctcaccgtctatgtcgtagagggcgacacatatcaaacattcccttacctggtgcaggtggacagcgatggctttgaaaactggtactatcccgaggatgttgtcgtctcagacaccgacgacgatgtgttcatatgcacctatgacctgtcggtgctggaggagcttacggaggagacttacctgatcttctccggcatggataaagaggtcgtcgttcccgttgaccttgcacaatggtgatacaatagcctcccctgtgggggaggctatttgctctatatagacaggccctccggcgaagccggggggcctgtttctcagaacttatccttattgaatatccgcaggatctcgtcgaaggacttgtccatctcgtcctgaccctgctcgcccttcacctcgtccaggggctggggcgcgccgctgttctccgtctgtgcgggctgggtcacagcggcggcgttggcggcctgctgcgcctcgtcaaagcccgtggcgatgacggtcacgcggatctcatcgtccagcgtctcgtcgaaggcggcgccgaagatagtcagcgcgtcgggatgcaccgcctgctgcaccagtgtggcggcctgctccacctcctccagaccgatgtccatggagccggtgacgttgatcagcacgccccgtgcaccgttgatagaggtctccagcaggggggaggaaatggccatcttggcggcctcctcggccttgcccttgccggccgcgcggcccacgcccatgtgggccagacctgcgtccttcataatggcggtcacatccgcgaagtccaggttgatgaacccggtgtcgcggatcaggtcggagatggactgcaccgcctggcgcagcacgtcgtccgcgatctcaaaggcgttggcaaaggtgatcttctggtcggtggcgtatttcagacgctcgttgggaatgatgaccagcgagtccaccttgctccgcagctcctcgatgccctgttccgcctgggtcatgcggcggcgtccctcgaagccgaagggcttggtcaccacgcccacggtcagaatgcctgcctcccgggcgatctcagccaccacgggtgccgcgccggtgccggtgccgccgcccatgccggcggtgatgaacaccatgtcggtgttctccagcgccttggccatctggttgcggctctcctccgcggccttgcggcccacatcagggttggaacccgcacccttaccgccggtcagcttctcgccgatctgaattttataggtagcgctggaggcattcagcgcctgcttgtctgtgttgactgcgacaaaatcaacgccctgcgcgccgccgcgtaccatgcggttgaccacgttgtttccgccgccgcctacgcccacgaccttgatgctgacaacgttctctgggccggtttccaatccaaaagccatgtctgctcctcctgccataatttgtatgaaaatgacggattatctcctggtaaatgctatatcttgtattgtattacgaattggcgcaagcgtcaagtgcaagcacttaatttaccgaaaaagttttgtgccgggagcatgaagtacctacgcagtgtccccgatgcggtgcggtacgcgcggcatcactccggaatgaaccgtgccttcccctcctgcatcatattgataacgcccttttcgttgacctccagcttctccaccacggccatcagatagtccagcttgtagccgtagtcggcctcccggggcagctgcacgtcgaaccgttccagataccgcagcgtcagctgtgccgggtcgctcatatccagcagcgatacgtctgccgtcatgccgcgctggtccagcgcctgcatcagcgtcagcagctgctccagcgccagctcctgcccctccgccgcctttgccggctgacccaccgccgggtctgtcagcgtcaggccctttacctgcatccgctgcttcgcggcagcgggcgttacctcgtccacgatgttccccgtgtcgcacagcaggtatgccttcccgtcctgcacgatggccgccgggtccgcgcactccgtcacgatgatggaaagcccgtccggcagcgaccgtcggaactgcaccgtctcgatatacggcagcgccttgcgtatgcgctccgccgcgctgtacttgttcatcaggaacatattgtccccctcgctgacccccgccgcgtcgatgatctcctgccgggtatagcggtcattgccgctgacctcgatgctgcgtatacggaaaaacagcgtcagagccagagagatggcggtgcagatcagcacaaaagccagcagcttgtagaggaagctcaggcttcctctccgccgcttatggttgtaccgtctgcgccttgccatcgtccgtgctcctccgctgttctcgttgtctcgtctattgtgccgtgatccgggcgcccagcgcccgcaggtccccggccaggtccgcgtagccccgctggatgtggccgatgccctgcaccgtggtcacgccctcggcggccagcccggccaccgccagcgccgccccgccccgcaggtcggtggccactacctccgtgccgtgcagccgttccgtgccgcacaccactgccacccgtccctcggtccggatgtccgcgcccatgcgcgccagctccggcacgtgccggtaccggctctgaaagatattctccacaaacaccgtggtgccctgtgcccgcagcagcgccgccatcagtatggcctggcagtcggtggggaaccccggatacggcgccgtccgcaccggcggtacggcccgcagcggccctttccgcaccaactgtatgtacccctcaccgcagcggacgccgcagcccgcctggtccaataccgtggtcaccgcagccaggtgccggtgctccgcgttccgcagcgtgacctctccgccggcggctgccgccgcgcacagataggtggccgctacgatccggtccggtatcacccggtgcacgcacccgtgcagcttgcgtctcggcgacaccgtgatgaccgagccgcccgcgccccgcacctccgcgcccatggcgcacaaaaagtcctgcaggtccgcgatctccggttcccgcgccgcattgcagatcaccgtctcgccctccgcgccgcaggccgccagcatggcgttctccgtggcgcccacgctgggcgtggccagcacgatctggcagccggtcagcttccgcgcccggcaccgcagggtcccgcctgcgtcgtcaatgtccgcccccagcgcccgcagggccgccaggtgcaggtcgatgggccgcggccccaactcgcacccgccgggatagctcagctccgcccagccgcaccgcgccagtatcgcccccagaaagatcacggacgaccgcatccgccgcatcagtgtctggggtatgtcgcaccgcgtcagcgtggtgctgtccaccagcagatcgtctccgtcccactgcacggcgcagcctaagtaccgcaggatatccgccgccgagtccacatcgctcaggtgcggacagccctcaatgcggcacacatccccgctgagcagcgtggcggccagaatgggcagtacgctgtttttcgcgccctgcaccgccacctcgccccgcagcggcgtgccgccctctatggtgatatacctcatgtgccctccctttcccgtccatccaacagctacgccattgtatgaacggacaggggagaggggtgactcccttacttccgcaccagcgccatgaccgtgtcgtagatgcgcgccgtggcgtcggggatacccagctccttcatggcccgggccatggagatgcgtttttcattatcggagaggatggcctcaacggccttgtacagcccgtctccggtgctctccggctccgtgatgaccaccgcgccgccgtgcttttccagcagccgcgcgttcttctcctgatggttgttggtgacgtagggtgacggcaccatcaccgtgggcttgcccagcgccgtcagctcactgatggtggaggccccggcgcggcacagcaccacgtccgccgccgccatcaccacgtccatgtcatagatatactgccgcacgtccaaccggtcggacttgggcagtcccagctcccgcagcttctgctccatggcctcccagccgcccttgcccaccgcgtggatgtggcggaagggatagccctctgcgtcctcccggcggaagaagtccaccatgcactcgttcatgtggctggcgcccaagcttccccaaaaggataccacaaggggggctccgtcgtcaaagcccagctttttccgggcctcctcccggctcagccggaagaaatccccccgcaccggcgtcccggtgacggcgatgcgctccgggtgcttgtagtgctgccggcagtcctcaaagcccaccatgatgacgtcggcgtagttctccagcatcttcgtggtcagccccggcaccatgttgctctcatgcaccgccgtggggatgcccgccctggccgccgccttcaccatgggatagctggcgtagccgccggtgcccaccaccaggtcgggcttgaaatcccgcaggatggcccgcgcctgccgtccggaggacgccagcacccgcaccgtgtgcagattgtggcgtatgcccgccgcattcagcttccgctgaaagctgctgacctccaccgcggcgtagtcgtactccgccttggccaccagctcgcgctccatgcccgtgggcgtgcccacgaacagcacggccgtctccggatctttctccttcatataccccgccaacgcaagggcagggtttacgtgtcccgcggtgccgccgcaggtaaatatcactctcattctgctgctccctggaaccgccgcggcggtccgacctctatattttgatacgaatagtagttttcctgcaataaaatacggaatgttgtcaaatcctgcgcttttatcccgcccgtgccgccggtatctgccgcgatacgctcagcacgatgcccatctccaccagctgcaaacacagcgctgtgccgccgtagctgaagaaggggagggagatgcccgtggtgggcacgaagccggacaccacggcgatgttcagaaatgtctgcaaggccagatgggtcatcacgcccaccgtcagcagcgcgccgaagcggtcgcgggcatggagggcgatccagaagccccgcagtatcagcatggagaagatcagcatgatgacacacgcgccgatgagccccagctcctcgcagatcacggaaaagatgaagtcgttgtactgctccggcaggtataggaacttctgccgtccccggcccagtcccacgcccagcaggccgccggagccgatggtgatcaggctctgcgccagctggtagccgtcgccgtagtagtcctcccacgggttgtgccacatctcgatgcgcgccgcgccgtacttgatgacgcccgcctccgccagcttgatgaacagaaagcccagtgcgctgacgccgccgacgcccaccgccaccagccagccctgtatgccgcccacgatcatcagcaccgcgccggtggcgaagatcagaacggtgcccgacaggtggggctccagcatcatcagcacgccgatgaccgccagcagcgccacgtagggcagtatgccctgccgccacgtcagcatcttctcccgctttttggagatggtgtcggagaagtagacgatgaccgctaacttggcgatctccgacggctggaactggaacacgccccggatgcccagccatcgggtggcgttgttggaggtgatggccagcgggttgtgggggatgatgaccagtatcagcagaaacagcgccagccccaccagcagccgtcccgcgccgcgccagcgctgatagttgatcttgctgacgatgaacatggccacaagacccagcgccgcgaaggcggcctgccgcttgaagtagtaggtgccgtccccggtgtcgtaataggcccggggaaagctggcggaaaacagcatgatcaggccgatgaccgtcagcagcagcgtcaggatcaggaaggggagatccatctgcccgcgggcggcttccttatgccggcgctccacctgccgcatccgttcctgctgggccttccgggcgcgctgttcctcccgtgtcatagtctccctcctttcctgtgaaaatagtgcgaagccttagaagctgaagcgctggcacacggccagataggcgatgacgcagcctatgacactgacggcggtgaacaccgccaccaccttggtctccttccagccgcacatctcgaagtgatggtgcagcggcgccatcttgaagatgcgcttgccgtgggtcagtttgaaatagcccacctggataatgtcgctcagtgtctcgcagatatacacgatgcccaccaggatcagcaccagcggcatatcataggcgaaggccagcgccgccacggcgccgcccagaaacagcgaccccgtatcgcccatgaacaccttggccggatagtggttgtacagcaggaaccccagcagaccgcccaccagtgcgccggagaacagccccagctgctcgaagccgggccagatcaccgccatcaccaggaagaacagacccaccggcacggtcacactgctgctcagtccatccagaccgtccgtgatattcacggcgttgacggtgcccacgatcacaaaggccgcgaacaccagatacacgatccacggcagcacgatgtgggtgttccagaagggaatatacaggttggggctcagcatcccctcgtaccgcatcaggcacaggaacgccaccgccgccgccagctgcaaaataaacttctgcggcgcggtcaggccggtgttctggtggtgcttcaccttctgatagtcgtcgatatatccgataacgccgaataccagcgcgaacaggtacacatacaggtgtacgaagctgccggccatcatccgctgccagcccaacacgacgatggtgaggccgatgccgatgatgaacatcagcccgcccatggtgggggtgccctgcttcgtcatgtgccaggagggcccgatctccttgatggactgtcccgccttcagctttaccagcgccggtatcagcagcttgcctgcgatggcggtgacgataaagcataccgcgacaggcagcacgatctccataattcccatactatcttgctccttccctccgcgccgcgcggaggtcttttctttatttctgcgtttccttcaggtgttcggccacgatgacccgttcatccataggatagtgcttgtggtcgatctcctggtaatcctcgtggcccttgccggccagtacgatcacgtcgcccggctgggcgtggtccatggcgtagtgaatggcggccacccggtcggggatcaccgcatagggtgtgtcatagcccttcagtcccaccagaatgtcgtcgataatggcctccggcttctccgtccgggggttgtcgctggtgacgatgacaaagtctgccagccttgcgccgatctcacccatcacgggccgcttcgttttatcccggtcgccgccgcagccgaacagcgccaccacccgccccttggcgaaggccttggcggattgcagcaccttttccagcgcgtccggcttgtgggcatagtcgttcagtacggtgtagcccgttctcggcgtagggatgatctccatccggcccttcacgccgtggttcttcgccagtgcgtcggcacactccgccagcggcacgcccaggttccagcagcaggccatggcgtccagtgtgttgtacacggtgaacagcgccggtatgcccacgtggacgtggcaccattccgtgtccgcctccgcgtcaaaatccacgcagccgggctccagcgccacgttcttcgccatcaggtccgcctgaccattcacggagtaggagaactgccggcggcaggtggcatcggccatcagccgttccgcccaggggtcgtcggcgttgtagatgcccacgtcgcactgccgcatcagcagcgccttggcgtcgcaataggcatccatggtcttgtggaagtccagatggtcccggctcaggttggtgtaaatgcccaccgcgaagggtatgccgtacacccggtccagcatcagtgcgtgggaggacacctccatcaccacatgggtgcagcccgcgtcggccatctcccgcagcagcttctgcagctcgaaggactccggcgtggtgcgctcggtgtgcagcacccggtcgccgatcatattctgtatcgtgccgatcaggcccaccttggccccggccttctgttccagaatgctcttgatgaggtaggtgctggtggtcttgccgctggtaccggtgatgccgatcatggtcatctcccgtgcggggtgatcaaagcgattgccgcccaccaccgccagcgcccggcggctgtccgccacccggacgaagggcgcgccgtcctccggcgcgcgctcgcacagcacgcaggcagcgcccttctcccgtgccatgggaatatatttatgtccgtccgtctccgcgccggtgacggcgatgaacagatcgcccgatcccaccagccgcgagtcgtaccgtacctcccggatgtcgctatccagctcggcgtttgtttccaaaatatccagcccgttcaacagctcacgcagtttcatcatcaactctcctttgcatctgtgcataatggtatacacactattctaccacatttcgtccgcggacaaaagggaaccgtgtgctctgttgggcgcaaaacgtgtggcgtcagtccgtcacggacgtgtcgcccagctgcacggtaatgaccgtgccggcctccacctccgtaccctcgtcgatggactggctcagcacccggacggagctggactcgctgcctgtggtgccggagaaccgtatcagcagccctgccgccgtggcggtggtgttggcctctgagggcgtcttgccgatgagatgcggcaccacgcacttgcccgtggacttctcctcgccggcgtacaggataacgctggacttgccggggatgatggcaccgccggccggcgtctggtcagtgatggtctcgccgtcgcccacgatcttatagctcagcgcgcggtccttcagcttcgccttggcctcctccacgctcatgccgatgacgttgggcaccgtggtgtccatgcccagcagctcctctgcggagtagctgggctccacgcccagatagggcaggatctccgccatgacggtgctggcggtgggtgccaccatgttgccgccggagacataggtccccgtggcgcggctgggggtgtccatggtgatgagcataatgacctgcgggtcgtccgccggcgcgaagcacaggaacgacaccaccacgtcgccggtctggcccttatcggccgtgccggtcttgccgccgatgcggtagcccgccacctggccgttcttgccggtgccgctggccaccacgtattccaggcactcccgcaccgtggcggaggtctgctcgctgatgacctgccgcaccggcgtgtcgtcgtggcgataggtcacgttcccgttactatcggtgatgcgctccaccagatacggcgtgtgcagatacccaccgttgacgcaggccgcctgcgccgcgatcagcgccagcggcgtcacggtaaagttctggccgaaggcgtagcaggccagatccagctgggtgaagctgctgtccgcggcgaacacgcccacggcctcgccgcccaggtcgatgcccgtggtgttcatcagtccgaaggagcgcatgtattcatagaacttctcgttgccgatgcgcagcccgtagttgatgaacgccgggttgcaggaattccccaccgactgcaccagcgtctgtaagccgtggccgttcttgttggagcagtggatggtgtagccggcgatgttgacgctgccgccgcagttgacggtggtggtcttatccaccacgccctcctccagcgccgccgacagcgtcaggatcttaaacgtggagcccggctcataggtatcgttcagcgccttgttgcgccattgcagcagctgcatatcggccacggtgctctccccgcgctcgatacgctcctgcagcgtctggtcgctgacggtcagaaagtcgttcagatcgtagttgggatacgacgccatggccagtatgccgccggtcctggcgtccatcacgatgccgctggcgccgttggcggcggagaacttatccaccatgctctcgatacccttttccagatagtactggatggtggtgtccagcgtcagcgtcaggtcgctgccgttcttggcggcgaaatactgctcataggtatacagcatatcgttctccgcctgatccttggaggagatgaccagtccgctctgcccctccagctccttctcgtaataggcctccagcccatacagccccgtgttctcgtcgcccacgaagccgatgacctgcgccgccagcgagccgtagggatagtaccgcttcgtgtccgccaccaggtgtacgcccgcgatcttgttctcgtccacatacgagcgcaccttggccgccgtgtcctcgtccgcccgcagctgtatgacctcatactgggacttcacgttgtccatccgtttccggatggccgaggcgtccttgcccaggatctccgccagccctgccgccagcgactccttcgtccagctgacgggatcttccgtgtcgttcaccgcgttgtcgatctccagcggggagagaatgatggtctccgcgctggaggagatcgccagaatgttgccgccggcgtcatagatggtgccccggttagccgtcaccaccgtccgccgtgtctgctggttcacagccttgccctgcaattcctcatgccgggtgatctgcaggtcgaacagccggaaaaacagcagcacgaacatcacgacgcccatcaggatcatcagtacaaaggatcgggtctgaatgatccggttggcccgccgtacgttctcgttttttcggttggaattttggttttctgccacgatagtgcctcctgttttgccgtcggaccctgctccggcgccgccgcgccctgctgttatagaccaagcaaggagcaagaagtcgccttcttactcctcgcgcttatactatactttccctcagcggaaatattccagtacatacgcccacagcgactctgccttttcggtaaagccgttcagcgccgccgcgccgcccgcggcgtatacctccacgctgtccgcacccgacaggtcgatgtactgtatctggccgctgctgggcttggacatacccgccgcctccgccgccgccttcacggtggccagatcgaaggtgcgctcatacgccgtcagcagcgccacgtgctcctcctccagggcggagatctcccgcttgatggaggacacattatcggaaatgccggtcagcttcacatagcacagcatcagcgcgatgaccatgcccaccaccagcaccgttcccagcagcagaacaggggagggccgcaccgcggcccgtaccgcggtctgccgccgctgtaccggctgtacctccggctgcgccggccgtaccttcttctgggggagctttccggcctcgtccagctgcttttcccgcgccagcgcgtccagatcatatgccaggctgccgtaggtggcgccgtgacgatagttggccatgtaaaactccctccttcctccgtcggttcttttccgccgatactttgttgcagccgcttgccatacacaaagtatggctgcacgtctgtgccgcgtctcggcgaaaaataactcgccggatgtggttcttttccgccgatactttgctgcagccgcttgccatacacaaagtatggctgcacgtctgcgccgcgtctcggcgaaaaataactcgccggatgtggctcttttccgccgatgctttgctttgctgttataccttctccgccacccgcagcttggcgctgcgtgcgcgggggttgtgtgccaattcctcttcgccggatacgatgggcttccggctcaccagcttcagcttcggcttcctaccgcatacgcacaccgggaactccggcgggcagatgcagccggtggccagctcctgcaaggtcttcttgatgatccggtcctccagcgagtggaaggagatcaccgccagccgcccgcctgtgttcagatgcgccgcggccgcctccagcatgggcggcagggcgtccagttcgccgttgacggcgatgcgtatggcctgaaagctccgcttggccgggtgctgcttctcccgcagcgcctgtggcggcatagcggacttgatgatgtccaccaactccagcgtcgtctcgataggctgctgctcccggtgctgtacgatccgcttggcgatggccggcgcgtagcgctcctcgccgtactcaaacaggatgcgccgcagctcctcataactccagctgttcaccacctcccgggcggtgagatacgccgtccggtccatccgcatatccagcggcgcgtcgtgcatatagctgaagccccgttccgcgtcgtccagctgcggagaggagacgcccaggtcgaacagcataccgtccgccccgtctatgtgcaagtcggcgaggatatcgccgatgcggtcaaaattgctgtggaccagcgtcacccggtccccgtagtccgccagacgctcctgcgcggcggcaatggccgtctcatcccggtcgatgccgatgagccgtccggtggtcagccgttttacgatctccagcgagtgacccgcccggcccagcgtgccgtccacatagatgccgtcgggcttgatggccagcgcgtccaggcactcgtgcagcagcaccggcacatggccgtagtccttctcctgcgtcacggtgctcacagacccatctccgccatggcgctctccagctcgccggaggcgaaggcatcgttctccacggcggcccagcgctcagcgtcccagatctccgcccggtcaaagctgccgatgaccacgacctccctggtcagccccgcatactcccgcagcttggcggggatgaggatgcgtccctggccgtccggctcgcagtccgccgcgtaggcgaacagcgcccgcagcttttttacctcgttgtaggacagcgccttcagcttgtccataaacgccgcccagctctcgtcggagtacaccgacaggcagtggtcctgtcccacggtgatgtggaacgtctggcccagctccttccgcagcgcggcgggaataaagaggcgccccttggcgtcgatcgtgtgtgcatactgaccggtcatgggtccgcctccttccgaaaaaaatagtccccggtggaaaaccgtgggaacatcccccacaaatatggatattgcccccacaattcaccactaacgaggttagtatacataatccccagcggaattgcaaggaaaaattatgtctaccgccacggcaaaagccagatattccgccggttttcggcccaattttcccactttttgaaacgcttgttcgatgaacataagcggaaaactccggcgagcacaagattttgtgcccgccggagcctgttaacacaagatgaggatttcttgtggaaatcgcagaaaaatttacgtggattttatagattttccacaaagtctataactgccgccggataccgcggcggcagcggcgttttccaccggtcgggatcggcctcgctttccgtccgaaaaggcggaccgccgcaggctctgcctgcggcggtcaacgtaaatactgtgtgggggaggggagcgctcagcgctggccctcgctcttttcagcggcggactcgttcagctgctggcgctgggcctgcatctgctccttgctggcggcccggaaccgcgcccgggactcctgtacctcggtcagcgcggcctggatggcctcctcggtgcggcgcagcgcgtcctcggtgtaggtgttggccacgtgatacagctccttgctgcggtcctcggcccggcggatgatctcgctgctcttctggcgtgccagctgcagtgtctcgctctcggacacgatggtgcgggcatccagctccgcctgacgcagtacctcctgcgcctccttcttggccccggccacatattcgctgcgggcggcgatcagctcctgggcctttttcagctccaggggcagcttggcccggatctcatccagcagatccagcgcctcgtcccggacgatgatacatttgtcagagctgaaggccacgctttttgcctcgtcgatcatgccgtagagcatatccaacaggcgctgtacatctttctcttccatagtgcggtccgttcctttctttttgtcggcgccgggaggctcaaccccgctgccgcatcaattcctcggcgaccggcgccggtacatacttttccaatggctggtggtagcggatcatctcccgcaccatggtggagctgaagtgctcatacgccgcgctggcgggcagcagcaccgtctccagcccgggacagataccgccgttgatgcgcgccatctgggcctccagctcccagtcggcgcagttccgcacgcccttcaccagaatgtgcgcgtccttgctgcggacgaagtccgccagcagcccggaccagttctccacctccacgttggggatgcccgccacggactggcggatcagctccagccggcgctccggcgtgaacataggctgctgcttctggcagttcaccatcacgcacacgcacaccttgtcgaagcaccgcgccgcccggcggatgatatccaggtgtcccagcgtgatggggtcaaagctgccggggtaaatggcgatattcattccgtatcctcatttccgccgcgatgatacaccgtcagcttgatcttgccgtatctgtactcccgatacagggcatagggcgcgggcatctccggcagcaccgtgtccaccgcgctctctgctatgattataccatgtgcacggcaaatgtcaaacgctgcgatatccgtcagcgcctgctgtaaaagcccgctggcgtagggcgggtcgaggaacacgatgtcgaacgtctccccgctgcgaagatacggcagcgcgtccccctgccgcactctggctctgtccgccaggcggcacagcgccagattttcctgtatcagcttcaccgcgtccgcccgccggtcgataaacacgcactccgccgcgccccggctcagggcctcgatgcccagctgtccggtgccggcaaacaggtccagtacccgccgtccctcaatgtcgaattgtatgatggagaacaggctctccttcaccttgccggtggtgggccgtgtctccagcccctccagctccttcaataccctgcctctggcagtccccgtgatcacgcgcatagtccgttaccccctggggtcaaaatgttcaaagatgaccaggttcccggccgcctcggccttttccatagtctccctgtcccgcacggtccagctggcctcctgcaccttgtagaagccccggcacagccgcagggacagattgccccggtcctcaaaccgataggcgatgaagtccggccgcgtccgcacgttcagcagcaggttcgccaggatccaccggataccgccgggcagatgctgcgcgtccccgtgggcggagaaatcctcgctcagctgtccccgcaggatatccggctcgttctgccacagccacatcaggcaccgggggtcgaaggactccacgcagtacgcgcccttgtacttcttcagcaccttgctggccgccgcggccagcgcctcggcgttgccgcgctccgccttcagctccacgatcagcggcgcccggtccgtgaacagcggcagcacctcctccagcagggggatcctctgctccgttccctccagcgggtactgctccagcgcctccgcggtcaggtcctcgatctccacgtccgcacccgctgtccgcagcagggaggcatcgtggatcacggccagcttgccgtccttcatcaggtgcacgtccagctccgcgccgaagccgttggccgccgcccgcttgaacgccgccatggagttctccggaatacccttctccctgtcatgcaggccccggtgggcataccgccactgccggaaatacgcctgatccatcttgccccgccggcaccgcaggcacagcagatacagccagaacagcaccagcagtacaataatgataattatgatcgctttcatcagtcgtttgtcagctcctccaccgtattgtcaatagccccggcgtcctctgtgcccgccgcggcagtctgcttcggtacctccctgctgtcgccgtgcttcacgaacagcatggtcacaaaggccagcgccgtgaacaccgccgcgtaggggaacagcacgtgcattccgaatttgtccatcagcagtcccgacaccatgggcgtagccacctgtgccgccatggacgccgtgtagtaaaagcctgtgtacttgcccacatcgccgccggaggccagctccaccaccatggggaaggagttgacgttgatggtggcccaggcgatgcccgccagggcgaacatggcgttcatcagtgccgcgggactgtccgctgtcaggaacccggccacgccgaaggctacggtcagcatcaccacgccggccagaatggtcttcttccgcccgatcctcccggcgatgaagcccaccggcagataggccgcgatggccgccgcctgggcgatgatcagcgtcaggttgtagtccttgtgcaggatgttgctggcgtataccgagtatttgctggtcacggcgttgtagccgaagaaccacagcacgatgctcagcaatatcagcagcaggctcttcacctcgtcagcggacagcttccgccccccgttggggtgcgccgcctcctctgcgttctcaacgcccgcggccacggactgcgcctgcatctcctttgcccactccggctcccgcaccgtcagcatgaacaccaccagcgccgcgagcatcagcgccgcgatgacgccgaagtacccggtgtagctcatcatgctgttgctcaccgatgccgtggcgaacaccatgcccagcgccagcacgataatgccgccggcgctgcccatcaggttgatgatggcgttggccttggaccgcaggggcttgggcgtcacgtccggcatcagcgccaccgccggcgaccggaacgtggccatgctcagcagaatgatgagcagcagccccacgaacaccaccagcgcgccgggattggccgccgccgcgtcccgggcgcaggcctgccgcgccggcaccacgtagttggtgtacgccgggtcggtgacggtcttgccctccggggtgacggtctggctgcggatggcggtgaactccgcctccgtgaatttatgccccagaataaagctctcgccgctgggggacagcagcgtggcgtccttctgctcgttatagatcaccgtcagtgccgccgggtcgtcaatggcggacaccttgtccagccgcttcagctgcgcgttgtccgcgaaggacagcgcgatcagcgccaccgccgcgatcagcgtgcccaccacgatgaacggcgtccgccgccctctcgggtgggtgcacttgtcagagatgtgcccgaacagcggcagcaggaacagcgccagtacgttgtccatcgccatgatgacgccggaccaggtctggctcatgccgaatttgttggtcaggatcagcggcactgtgttgtcataggcctgccagaaggcgcagatcaggaaaaaagcaaagccgaccagaatggtgcgcttgtaattcagcttcatggtgtctcctcccacgcgcggaataccgcgttgatatcgtcgtacacccatgtggggcgtatgccgtctctttcaatgtcgtcccgtgtcccctcgccggacagcacgaaaacgctgtcgatcccggcgttcaccgcgcaggcgatgtccgtgtacagccggtcgccgagcagtaccgccgcctccggcgggtacccggtctgctccagcgccagctgcaccatggcgggccggggcttgccgatgaactccggctcccgtccggtggcccggtgcagcatctcgcatacgctgccgcagtccggcacggcgccgtaccaggtggggcacacccagtccgggttcgtggccagccaggtgacaccccggttcaaaaggatgcaggcgtcctccagcttctgaaacgtcagctcccggtcaaagccgctgagcaggatctccgcgccgtcctcccggtcacaggtgacgggtatccccgccgctgccagctgatcgtaaaaggaccgggtcccctgcacgtagcaccggcgtcccggataccgccttcgcagcaggtcgacggccgcgtccaccgaggtcaggtagtcctcccgcccggtggcgatgcccatgccgttcagcttttctatatagccctccacacctttggaggagttgttggtcaaaaacagataccgtccgcccttctcccgtatgcgggagagaaaggccgttaccccgtcgaacagccggtcgtccagatagatggtcccgtccatgtccagcagaaacagccgcttatcctgtaaacgtcccaaggagcgccctccttttcagatacataccgtaaaagacagaataccacacgtttgccgcgatggcaacaaaaaccccgtcacaccacctgaaaaataaagaatttcagatagttcgtctcctccacgccccacaggatggggtggtcggcgcactgctgccgcgcttcgatctgccgcagctgcacccccgcgtcccgggcggcgtcctgcagcatcttgatgaacagcgcctccgacgcgaagtggctgcacgagcacgtggccagatacccgccccggggcagcagcttcatggcccggtagttgatctccttgtacccggtcatggcgttgggtatggtcctgcggctcttggtgaaggccggcgggtccagtatgatgaagtcgtatttccgcggctgctccgccagctgcggcagcaggtcgaacacgttggcgcacacgcagtccatcacgccgtccagcccgtttttccgcgcgttctccgccgcgcagtccacggcgaactgcgacacgtccacggcggtcacgtgcttcgccccgccctttgcggcgttcagggcgaaggagccggtgtgggtgaagcagtccagcaccgtcctgccctttgccagcttcgccaccgccagccggttgtacttctggtccagaaagaagccggtcttctgcccgttctcaaagtccaccgtgtaccgtatgccgttctccgtgatgtcctcggcggtgctctccggcgcggcctcgccgggcagcgtcatccggcccttgccctgcgccatgccctccagcgtccgaagggccgcgtcgttgcgttcgtacacgccccggatgacctgcccgtcctcccgcaggatgcgtaccagcagcggcagcacccgttccttgatgcgttccatacccaggctcagcacctgggccaccagcacgcgctcgaaccggtccaccgtcagtcccggaaagccgtccgcctccccgaagatgatgcggcagcaccggctgtccgcctcgcccatcaccgttttgcggtagtcccaggcgtagcgcagccgccgttcccagaaggcgtcgcccgccgggtcgtcgttggcgttccgcgtcaccagccgcacccgtattttggacgcgctgttatagaacccacagcccagccagctgccctttttcgacaccacgtccaccaggctgccgtcctccggcgtgccgctgaccgacaccacctcaccctcatagacccacgggtgcccgtccacgatggcgcgctcccccttgggggtgatggtgacgatgggatacggtctggcagctttcatggcggttactccttttgtacaggaaaatttctcctaagtatagcacaaagacaagcatatttccatacgatgtataaataaagtatcgctgaagtacagacaaagtatagtaaaacgcacagaacaagtataggaggaactgctatgccgcgtatctttttaagtccatctacccaggaatataacccatatatcaccggaaacggctcagaagagtactttatgaaccaaattgccgacgccatggagccctatcttttggccaacaccatccgttttacccgcaacacccccgacatgaccgccgccagctccatccgcctggcaaattctggaagttacgatttttatttggcgcttcactccaacggcagcaccgatggtaccaaggagggcgccgtccgcggtgtcatcgctttttattatcccaccagtgctaatggccgccgcgcggcggacatttttgtaaaaaacttaaaagacatctatccgttgccggacaaggtctatgcccgtgccaccaccacgctgggcgaggtccgccagccctatatgccctccgtactgctggagctgggctaccacgacaacaccgctgatgcccgttggatcgagggcaatatccaggccattgccgccaatttggtgctgtcgctgacagagtacttcggcctgcctttcgtcacacccataacaccctggcagggcacggtgcagacgccgggcggaggtccgctgaaccttcgtgcggcccctggcacccgggccgaggtggtcacacttctgccgaatggcgcaaagctcaccgtctacggtcgctatcaggagtggtacacggtgggttaccaaggccgtctgggttacgcttacgccgatttcattcagtgacccaacagatacggtgccttgcctgaaaaacgacaaaagaaaagtttactttgcccttgacagttgaccataatatgtttaatatagtaaaggatcattatcggggcataggagcctttccgccccggttgtcatccggcaccatattttgtgccgacgcaaaaacccaataacaacataggaggaatgtaccatgaccacaactggctggatcgtggccatcctctcgttcgctgtcgccctcgttctgggctttgtggcctgcacgcttatccgccgccgcaaggaaaagaacgaccagcgcaagatcgaagacgccgagcaggaagctctgcgtatcgtcaatgaggccatcaagagctctgaaaacaaaaagagagaagcactccttgaagcaaaagaagagattttgaagaaccgcagcgagtacgagaaggaagtcaaggaacgccgtgccgaacagcagaagcaggagcgccgtctgcagcagaaggaagagaacctcgatcacaagaccgagatgatcgagaagaaagaggaggccctggcccagaagcacgctgctctggacaaggagcaggaggagatcaagctcatcaagcgcagccagaccgagatgctggagcgcatttccggcttcactgccgagcaggctaaggattacctgatcgcccaggtggagtccgaggtcacccacgaaacggcgctgaagatcaaggagatcgaagcccgcgccaaggacgaggccgaccagcgtgcccgcgagatcgtggccaccgccatccagcgctgcgccgccgaccacgtggccgagatcaccgtcagcgtggtgcccctgcccaacgacgagatgaagggccgcatcattggccgcgagggccgcaacatccgcacgctggagacgcttaccggcgcggatctgatcatcgatgacacgccggaggccatcaccgtctcctgcttcgagccggtccgccgcgagatcgcgcggctggccctggaaaagcttatcgccgacggccgcatccaccctacccacattgaagaaatggtggagaaggcccgccgcgaggtggacggcgtcatccgcgccgagggcgagcgcgccgtgctggagaccggcgtccgcggcctgcatccggagctgcagaagctgctgggcaagctgcactaccgcaccagctacggccagaacgtgctgcagcactccatcgaggtcagccatatcgccggcatgatggccgcggagctgggcgccgatgtgcaggcagccaagcgcgccggcctgctgcacgacattggcaaagccctggaccatgaattcgagggtacccatgtggcgctgggtgtggaatacgcccgcaagtaccgcgagaaggaagacatcatccatgccatccaggcccaccacggcgacgtggagtgccgcacgctggtggcctgcctggtgcaggcggcggacgccatttctgcggcccgtccgggtgcgcggcgcgagaacctggaaaattatattaaacgtttggaaaagctggaggagatcaccagcagctatcccggcgttgagaagagctatgccatccaggccggccgtgaggtccgcgtcatggtcaagcccgagcaggtcagcgaggatgaaatggtcatcctggcccgtgagctggccaagcgcatcgaaagcgaactggaatatcccggccagatcaaggtccacgttctgcgtgagacgaaggtcgtggagtacgcgaaataaaaatttaatgtttgcaggggccgcttcgcattgcgaagcggcccctcttttgctataatgtcttcgagtacacagaaaaaccgaccggacccccgatggaggacatactatgaagcgttttctgctgttatttctgctgctggccctgctgctgagcctgaccggctgctttaccatcaccggagacacgaccaacacctcaccggaggggaagcaggaggcgccggaggagcagcacctgaccgctgacgttgacgagacgcaggtctggcagcgcactgccggcgcgccctggaccggcggagaaccccagaccgtcagtgccgactttgagcgcatcagtggcgcggcggcccagggcatgaccgtggggcaggaacttctgctgctggactttatggactgttactaccagtccgttgccgacctgcgggtcattgacccagccgtgctgttcgccgacagtgaggagacgctctaccacaagaatatctggcacggcctgtgcgtcatccgcaagctctcgcccatcgacctgaccatgacctcgtacagctattccctccgatgcgtatccattatgccctccgaggagaccgagggcgacgtggacctggtgctccgggagaataatgtggtctatttcaagggcttgaatggcctgccctcggagcagttcggtatcaagcacacctttaccctccggggggagggagacgactggtccatcgtgaagcactggtctgatgacaatccctattacagtgccgactatgaccgcaccacccatcaagacaagaattttcccgctatcaccgactacatagaggcccgccgcgacctgcctcgcgagggactgagcgtgacagccgctgccgaccacccctatgaccgccaggctgcccgggagtatatgctctcctgggtgggtaagcgcagcccgtccttcatggcctatgacgatctgggcggcaactgcatgaacttcggctcacaggtgctgctggcgggcggtatccccatggacgacgccggcggctacgagaccggctggtattggtacagcggcggacagagcacgctgccctgggtcaatgtggggtccttccgggactatgtggcggtaccccgtgaaagcggtctggtggctgtggcggacgcgccctatttcagcggtgagaccggcgacattatcaccatgggcgtggacgagccggccaatcacaccgtcgttattctggacaccattacggatgaaagcggtaatgtggtggactatctgctctgctccaacacggcggatctgcggaatttccccgcatccgcgtattactataccaatcgccagctgatcaggatcatcggctggaacgactgagcaaggaggcgtattccgtggaatacaaggttttggcgctgggcgatgtggccagcgagacgggcctgcagctgctggaaaagaagctgcgggcattcaaaaaggagcatgacgtgcgcttcaccgtggtcaatggggagaacatctccggcagcggcctgaccagaccgcaggcggaggccctgtttgccgccggcgcggatgtgatcaccttgggcaaccataccttcggtaaaccccagatcgccgcctatctggacgaggagcgctatatcctccggcccgccaactttaccggtcgcgcgccggggcacggctgtcaggtggtagactgcggcgcgttcagcgtggcggtattggtgctcatcggccgctgcgacctggacttcaacgcggaaaatccctttactaccgtcgataagctgctgaaggcgcaggcggacaagcccacctttacactggtggagttccacgctggagccaccagcgaaaagctggccatggcctactatctggatggccgtgtctccgccctttggggtacccacacccacgtgcccacggcggacatgcaggtattccccaagggtaccggctatgtcaccgatcttggcatgaccggccccatccgttctgtcctgggtatccggccggagcagtccgtggagtttttcctgggcggtctgccgggccgctatcaggcggcggagggcccctgctccgcccaggggtgcatttttaccctgaacagcgacacgggaatgtgcgaaaaagtggacagaatagagatgaaataactggtaggtacgaaaagcggactggaaaaatttttgaaaaaacttgaaaacaggagtgaatttttgactatgtctgtggaaaaagtaagagaatacctgaccccctacggtgtcgcggatcgtatgcgcgagtttgaggtctccagcgccacggtggagctggctgctctggctgtgggcgtggagggtgcccgtatcgccaagaccctcagctttaaggtgggggaggaccccatcctcatcgtggccgccggcgacgccaaggtggacaacagcaagtataagcacttcttcggcgctaaggccaaaatgctcaccgccgaagaggctgtggagcgtatcggccacgccgtgggcggcgtgtgccccttcgctctgcccgacgacgttaagacgtacctggatgtgtccctcaagcgctttgacacggtgtttcccgctgtgggcagcgcggccagcgccattgagctgacctgtgacgagctggagcactgctgcggaaagaacttcgttcagtgggtggatgtgtgcaagggctggcaggaagaggaagcgtaaatggtgcgggtcgttcacgcaggtgacttccacctggacagtgccttcggtgcgctgacgccggagcaggcccgccagcgtcgtatggagagccgccgcacgccggagcgcctggtggagtgggccaacgaccacggtgcggacctgttgctcctctccggcgacctttttgacagcgacagcccctatggcgacaccgcgcccctgctggcccaggcactggggtgcttccgcggtcaggcagtcatcgcccccggcaaccacgatccccttacaccggacgggccctatgcccgcacgcgctggagcgacaacgttcacatctttacagaggaccatatgcagaccattacattcccggacctgaactgcgccgtacacggcgcggccttcaccgccccggagtgtcccacggacagtgtactccccggcttccgtgtgccgcaggacggccttatccacattggtctgctccatggtgacgttacgacctccgacagccgctaccgtccgatccgcgcggcggatatcgccggcagcgggctggactatctggcgttgggtcatgttcacagctgcagcggcgttctgaccgccggggcggtcccttatgcctattgcggctgcatcgagggccgcggcttcgacgagctgggcgaacggggatttctcttcggcgaggtgggggcgggcaccgccgacctgcgatttgtcccctttgcccggcgccgctactgcatcgcccaggtggatgtcaccgatggcgacgccctcaccgccctggagcgtaccctgccccatgatacggagcaggatatctaccgcctgcgtctgaccggtacgccggagcagccgccccgcctgtccctgctggaggaggccctgtcgggccgattctttgccctgcagctgcgggacgagactaccgtgcgccgggacctgtgggacaagtgcggcgaggatacgctgcggggcctgtttttgcaggaactgcgccgccaatacgacgccgccccggatgacgctgtccgccgccgtattgagcaggcggcccgattcggcacggcggccatggatgaccgggaggtatgagcatgaagaatatcctgatgatcggcaccggcggtaccatcgccagtgagatgacgccctccggcctgacgccggagctgaacagcacgcagctgctgtccttcgttccccgtatcggcgagatgtgccatgtggattgcgttcagctctacagcctggacagcaccaatatccgtcccgcccattggctgggtgtggccagggccgtgcgggagaattacgatagatatgacggctttgtcatctcccacggcacggacaccatggcctataccgctgccgcgcttagctatctgatccagggcagcccaaagcccatcgtccttaccggcgcgcagaagcctatctggttcgacggtaccgactccaagcgcaacctgaccgacgcgtttctctacgcctgtcgcggctgcggcggcgtgcagatcgtattcaacggcaaggtcatcctgggtacccgtgcccgcaagatctgctccaagagctttcaggccttttccagcgtcaactatcccgacctggccgtggtacaggacgagcacctgctgcagtatatgcgctgcgcctgctatcccagcccggtgttctatgacgcgctggacgacaaggtgggactgctgaagctgatccccggcacccctgccgccgtgctggaattcatgctggaccggtttgacggcctggtcattgagtccttcggcgtaggcggcctgccggaatatgagggcgacgccagctatttcgatatcattcaccggggcatcgcgctgggcaagctggtggtcatgaccacccaggtgcccaacgagggcagcaatctggcggtctatcatgtgggcgggcggctgaaaagcgccctgcgcctgctggaggcctacgacatgaccacggaggctgccgtggccaagcttatgtggatcatggggcagacccgtgatttcgacgaggcggagaggctgttttaccgcccggtggcccgggatatactgtatgagaattaaaaaggaagcgccgggggcgcttccttttttgcagtttatgacgaagaggggatatgtttgcctcagctgttctttttcgtcaccgggcggcggtacagcagacgggccagcttcttccggtcaaaaggaatgagagggtacaggtatcccttgcccaccagcggctttgccgtcacgatcagcgtcagcgtgatcacgatccccgccgcgaagccccaccagtcccacagccagatcagcaccagcagcagcatccggcatagctttgtggcgtagcccatctcatagctgtgctgggcatagttggctaccgccacaaaggccatatacaccagcacctccggtaccagccaccgggcctgcaccgcgaagtcacccaatatcagcgcacccagcatactgaacgagttgctcagcacatccggtgtgttcagcgacgcgattttcagtatgtcaatgatcagctccaccagcagcagctgcacgatcagcggcacatagtattcgtcctgtaccaaaaggaaacgcaggttctcgtgcagcgtatccgggttcttcaccagcaggtaccacagcggtgtgatgaacatggtcagcagcagcaccagcgtccgtatgatctgcagatacgtgccgatgaggggcgggaagtagtagtcgttgatctcctcgttgaaccgcaggatcgttgtgggcagcagcagggccgacgctgaattgtccaccagcaccaccacatcgccctccatgatacacgccgtggccacgtccggacgctcggtataccgcaccttgggaaacgggttccagaactgcctgggcgcgatggcctccgcaatggtctcctgactcatggccaccgaccgcaactggatgtgcatcagcttttcccgcagggcccgcagcagcccctcgtctgcctcgccctccatgtagcacagggccacgtccgtgcccgagcgctccggcagctgcaatcgctccagccgcagatgggtgtcccgtacccgccgccgcagcagcgccgcgttctgcatgaggttctctacaaagccgtcgtggctgccccgcagtacccggctggtatccggctcctccaccgaccgggtggggaactgcttggcgtccagcaccaccccgccgccgaagccgtcgatgatcgccagcgtcttcccggcgaatacgcccatcaccgccgtgtcacggtccggctcagccgccgcatcgcaggcggacacataccgccggcagaagtccgccgcgtctgtcacactgttcaggtccggcagcgcctgccacccggcgatgacccgctccagcaggtcctcctgggcgtagccgtttaccacccacagccgcgcctgccgcccgccgatggacaggtcgcgccctgtcatatcaaagcaccggcccacgcccagcagttcgttcagctccgccgctttcagcgaaaagcaccctgcgccgcgataatagcccgccgtttccggggccgtctcgtttccgccctgttttgcctgttccatgatgccttctgtcctccgtctgccattttccggtagcatttcccgcctgcggaattttatgtatgccccggacaggccctgcatatcgtgtaaaaaaggaggtggcagccatgaaaaaaagcgcggcggcggcccttattctaatggtgctgctcttcggcggcgcctacctcactgtccaggaatcggacgagcttccgcctgaagaaccgcaggcacagggggacggggaggtcgtgctgaccataaaaaccggggaggcggcggagcggatgacgctgcgggattaccttgtgggcgtggtccgcggcgagatgcccgcttcctttgagatggaggcgctgaaggcccaggccgcggccgagcgcacctatgtctattatcagctggcgcagggccgcaaggacgcgcatcccgacgccgacttctgtacggaccatacctgctgcagcgcctatctctccgagacagccgcaaaggaaaagtgggccgccgactttgctccctggaacacccgcgtcgtccaggctgtggcggacacggacggtctggtggccctctacgacggggaaccgatcctggcggtgttccactcatcctcggcgggcaggaccgccgcggccggggatgtctggtccggtgacctgccctatctggccagcgtcgccagcccggagagtgccgacaccgtgcccaactattacagcaccgtgaccttcaccgcggcggaggcaaaagaccgtctgctggcggcccacccggagataaaacttaccggcgcgccggagatgtggttcggcgcagtgacggagaatgattccggccgggtagagaccgtctccgtgggcggtacggacatcgagggcacggagatgcgccgcatcttttccctgcgctcggcctgctttaccctgacggcggatgcggagagcgttacgttccgcgtcactggctacggccacggcgtgggcatgagccagtacggcgcggagcagctggcaaaggcggggaagacctggcaggagatactggcgtggtattataccggcgtgaccatcggaccggcggggtgacatcggccgaggggccgactggggtgcagaaatgcgtgacaagcgggcaaaaacgtggtataatctataaattatgcgggatattcacaaattgttcaggaaaagcctgccccgcaggatgtaagatatacccaacgatatgtaccgggaggagagcgcctatggcacgcaacattctggtggtcgaggatgaccgcaatatatccgatctgatccgtatgtacctggagaaggagggcttcgaggtccgcagcgcctatgacggcggcaaggccatcgaggagtacgacaagcaggcccccgacatggtgctgctggatatcatgctgcccgtggtggacggctggggcgtatgcgcccatatccgcgagaagggcaagacgcccatcattatgctcaccgccaagagcgacgtgggcgaccgcatcaccggactggagatgggcgcggacgactatctggtcaagcccttcgagatgaaggagctcatggcccgaatcaatgccgtgctccgccgcagcgagatacccgacgataccaagaaaaagttggtgttcgacaagctggtcatcaatctggacagctatgagctgctggtggacggcaagaaggtggacacgccccccaaagagctggagctgctgtatcatctggcggccacgcccaaccgggtctatacccgcaaccagctgctggacgaggtctggggctttgactatttcggcgacagccgcaccgtggacgtgcacatcaagcgcctgcgggagaagatcgaaaacgtctcggaccagtgggagctgaaaactgtctggggcgtgggctataagtttgaagtgaagtaagcatgggcgagaggatcaaacgtatcaccggcagcctgtattggcggcagtttatgctcaccgccggtatggtggtgctgaccatggccctgctgggcgtgtccttctacgcgctgagctataactacaccgtctcggagaagcggcaggagatgcaggaccgggcggtgctggtggcgcagctgtccgtggactattttaccgccggcgatgacgccgagcgtgaccagggggacgcgctgcgctctctggccggcgtggcctcccggatgacggacgtggacttcctgatctgcgacaccaccggcagcgtcctgctgacgacggatgccgatttggccggaaagaccgtcgttgtccccgaggacattacccaaacggtgctgggcagcgagagactgtacgagggccgcagcaccgtgggcgtatatgagaaaaagcagttcgtggtgggcgtgcccatgacagacgcggacggcaacactctgggcctggtgctggcggtgatgaacagcgccgagctcatgcagatgtggcgctcgttcatcgccctgttctttatgaccagcgccattatcctgctgctggcgttcgtggccagctttgtcacctccatgcggcagatacagcccctgaccgagatggtcaaggccacccgtgcctatgccggcggcgatttcgatgtacggatgcaggagaccggtgactgcggcgagatcagtgagctggcggcggccttcaatgccatggccgactccctgcaggagacggagcgccagcgccgggactttatcgccaatgtgtcccatgagctgaagacccccatgactaccatcgccggctacaccgacggtattctggacggcaccatcccgccggagaaggagcgccagtatcttcagatcatctccgacgagagccgccgtctcagccgcctggtgcggcgtatgctggatatctcccagatacagaacaaggagatgaagaaggaggagtttgatctctgtgagtccgcccgtattgccctgctgtccatggagaagaaaatcacggaccgtgggctggacgtggacgcggagatccccgaggactccgtcatggtccagggcgaccgggacctgatcacccaggttatttacaacctgctggagaatgcggccaaattcgccacccctggctcccagctgtatctgggtttggcggtcaacggcgagaaggcctatgtcaccgtccgcaacctgggctccaccattccggcggaggagataccgctgctgttcgagcgcttccacaagtccgataagtcccgcagtgaggacaaggacggttacggcctgggactgtatatcgtcaagaccatcctggcccagcacaaggagcagatcaccgtcaccagtcaggacggtgtaacggcctttacctttaccatgcagatggcgcacggcgcgccccgagaggtgctctaatatgtatgatgaaaacaacacgccgctgacgcccgatccggcggctcctgccccggagctggagccggacgaggtcgtcagttggtatgtccgtccggacgaggggcaggagatcacgggctgctatgtgcagccgggccccatgcccgctgccgcggcgcccaaggctgtccggcaggagaagcgccgcagccgcaagggcctgtggacgtttctggtcatcctggccgtgctggtaggcgtggtgctgggagtggccatcgtctccgccctgcggggcggcaattcggatggctacggcggcgatttcgacgacggcgatcacgatgccagcagtatcgtggatatcttccagagcgatgtgcccaccatcccccgggcagacacggaccccgatctgcgcttttattgcgaaaaggcaggggaggagaagctgactatccagcaggtctatcagcaggtaaaccccgccacggtgctggtgctcaccgacctgggcgaaaaggccagcgtcggcaccggggtcatcctgacggcggacggctatatcgtcaccaacgcccatgtgatcgccggcgggcagaacgcgctggtggcgctgtacaacggcgaccgctacgaggcggagctggtgggcttttccagcaccgaggatctggcgctgctgaaggcggtgaacgcctccggtctgcccactgcgccgctgggcgacagtgaggaatgccaggtgggcgatacggtctacgccatcggcaacccgctgggcgttgagctgcggggcacactgacccagggcatcatctccgccatcgaccgtcccgtcaccatggagggccgcgtgatgacgctgctccagaccaccgctgccctgaacaacggcaactccggcggcccgctgatcaatgagtacggccaggtcatcggcatcaacacactaaagatgagcaacaccctgtccgacatctctgccacggtggagggcctgggctttgccgtcccgtccagccgtgtggtatctgtcatcaatgatatcatcgccaccggaggcttccacggcctgccctcgatcggcgtctacgtgcaggagacggaatttgccgacggtacgacccacccggtgatcgattccgtcacggaaaacttcggcgccgaggaagcggggctgcagaagggcgacgtaattctggcggcggacggtataggcgtcagcaccaacaccgatctgctggccgttcgccggacccacatcgtgggcgagagcgtcgtgctcactatccggcgtgacagacagacctttgatgtgacggtcgtcctctacccggtggagggatgatcactttacagcgcagaaacagggacaaggccatggccttgtccctgttttacaccgcaaaacgacggatatttacagataataaacaaatagtatacattttattgccggaatttgcggctattttcgccttcgttcctgccacagctgccgcaggctgccggcggccgccagcagcagatatgccccgaacagccgccgcagtaccgctgtgtccaccgccgtcgctgccagtgcaccggccgccgcagccgttgtgccccaggggatagcggatttcagcgcctccgtttccagcagcccgttccgattgtgggcgatgacgcccatggccgccgtaggcaggaagtacagcagattgaccgcggcggcctgctgctgcggaacacccaaaatgagcgtcataaccaacagcagcagggtcccgccgcccacgccccaggcggacaggatgccggcgccgaaccccgcagccattggtatcagccaacttttcacaggatatacctcacgccgccgtacagcagaaaggcggcgaacagtccccgcagccatgtgacgctgacccggcggaacagccgtccgcccaccagcccgcctgccagtccgccgatgaggtacggtagcgcggaggcccagtcgaagggctgccgcagcaggtatactgccgcgctgacggcgcttaggggcagtatggccgccacgcaggtggcgaaggcctgcttgccagccagaccgcaccagccgttcagcaggggcaccagcaccatgccgccgcctccgccgaacagtccgttcaccagccctgccgccgtgccggacagggcatattttgtctttgcctgcattgtgccgcctcctttatgtatgcgcccatccgggcgcgggggttactggcacttctggtagctctggcagtcggtgcactggtccatggtggggcggctctcgtgggtgcccacctgaatggcggtcagaccgcagttgtccacgtccttgcagtggtgggcacagttggtgacggtgcacttgatggacgcgttgggggtgcaggcgcacccgtcgttggtacaggctctgttcatggtgtttcctccctgaaaaataaaaagtcaagcccgaaggcttgactctatttttgcccggagcgcaggcggatatgcacattttttatatgccgagaagcgccgaagcgaagctgaaatagatcagcagactggtggcgtccacgatggtggagatgaagggactggccatcaccgcggggtccagaccgaccttttccgccagcagcggcagggagcagcccacgcacttggcgaacaccaccacgaacagaatggtcaggcacaccaccagacacaccagcggcgttaccgccgcgttgtccaacagcagccgatccaccagcagcatcttcacgaagttggccccggccaggcacacgccgcacagcagcgagacccgcagctccttccacagtacccggagtacgtccgagaagtccacctcgtccaggctcaaggcgcggatcaccgccacgctggcctgcgtaccggagttaccgccggtgccggacagcatggggatataggcgttcagtaccaggcaggctgccagcgcgttttcgtagtggttcaggatcatacctgtgaatgtggccgacagcatcagcaccatcagccagggcaggcgggccttccaggtggcgaaaacgccggtacggaggtacggcttgtccgagggcagcatagccgccatcttttcgaagtcctccgtggtctcctcctcgatgacgtccatagcgtcgtcgacggtaacgatacccaccagccgcttttccaggtccacgatgggcatggccaggaagtcgtatttgctcagcgcctgggccacgtcctccttatcgtccgtggtcttggcccacaccacgtccgggtccatgatctcctcgatcaggtcgtcctcctctgccagcagcaggtcgcggaccgacagcacgcccagcaggtgccgggtgggatcggtgacgtacaggatgttgatggtctccagctcgccgccaatacggcggatgcgcttgaaggcgtcctccaccgtcatgtccttcttcagggacaggaactccatgttcataatggagccggcactgtcctccgggtatttcagtatttcattgatagatttacgcatctccggtgtggccttgtccagaatacggatgaccacactggcgggcatttcctccacgatgtccaccgcgtcgtccagatacagctcgtccagcacctcggtcagctccgtgttggaaaagccgttgatcagcatctcctgactctccggctccaactccacgaatacctctgccgccgtctccttgggcagcagacggtacagcaggggcatctgctcctgcttgccctcttccagcagcagggcaatatccgccggctccatgggcaggaacaggtcccgtagctcggcgtagcgtttttgcgtagccagctcatcgatccgttccttgtattgctccagttcctcctgataatcgatcaaacctgttccctcccttccggtaaaataataatacgcagcaggcagtagcctgctgcgtgccgcaaagtgcgccaatgcgccctgttctgcaccgttacaagctttagcatcgcggggcggtgaaactgcattagatgccaccttgctttcgatggcacctgctcaaaccctctgatggtgtctccaccacttcgcggcagcagtccgtatccctcgcggtagccttacctaccggatcctattcaacatatctatgttatgccaaaatcgtcggcctgtcaaggcgttttcttgtcattcctgctatttttctttacaggtacacctgcacattgtcctgcgccaacaggtggcccttcaactcctgcaaaaatcgcagggccggcggtgtcagcggttcgcccgctcgcgtcaccagataattcacccggtccggcggcgggctggtaaagcggcatacccgtgcgctctttccgatgcgcgacgcggcggcgatggccggggccgccatccagcggccctcggtgggcggcaggaaatccgccgcctgtagggtgtcggcgtacagcaggggccgcgcacccgtgccgaaccaccggtcgtgccagcggatgaactccgggtcccaggtgaccaacagttcctcggctacgtccagcgaggccgggtccacctcctccgggtagtggctgtccggcggcgacagcagcagaaacggctcccgaaaggccggacataccgtcagccggtcgtcaaataccgtgttgctgtcaataaaggcaaagtccagctcatggctcagcagcgcctgggtgatatccacatcccgcagggtgtggatccacagggataccggcagccgcagggcaagaaagcgcttatacaccggcggcaggatgtattggttagtggtgtaggtggcggcgatacgcaggtaggcgcgctgctccagctccgccagcgtctccgtctccgagagcagctgctgccagcgttgggccagcgtcagaaatttctggcccgccgccgtcagcgtgatgcgccgctggcccttaccccgcacgaacagcggcgcgcctacccgttcctccagcgcccgtatccgcatggacagcgtgggctgggtgatgtacagcgcctccgccgcggccgtcatggtgccatgctgtaccaccgcccagaatgtctcgatatccaggttggtcatactaccgtctcctaaaatataaattttcgttgatattttacacgaaaacaatcaattttacaagtgcggatatccgtgctatgatacggatgtgttcagggaacaccgctggttccctaaacagcacgctattttgattctttctttcttcctatttccctatttctcccccctaatacccgataaaaaaggacaggtttttccagcctgtcctttcgggctgtttaggggtagatttttccctgcggacgtggtatggtaatgctgttgtacacaggagggataacgatgcccggttttcagttttattttgaattgatcggcgcggtggccttcgccatttccggcgcagccctggcggtgaagaagcatatggacctgttcggcgtggccatgatgggcatgaccactgccgtgggcggcggtatcctgcgggatctgctgctgggtatcacgccgcccgccgcgctgcgcgaccccttgcaggcgttggtggccatcgccacgtccttgctggtgtttctggtgtggaagcgctttcaccccgagggcgatcaccggaactgggaggcactgctgctggtggcggactccatcggtctggggatcttctccgtccacggtgcggcggtggccgtccgggccgggctgggcggcaatgtgttcctgacgctgttggtgggtatgctcaccggcgtgggcggcggtgttctgcgtgacctgtgctgtatggagcgcccctacattttcaccaagcatatctacgcctgcgcgtccctggccggcgcggcggcatgtatgctgctgtggagcgccggagagaacctggcgctgctgacaggctgcgcgctgacggtggtgctgcggctctgtgccgcggtattccgctggagcctgccgaaagcgtaaacacataaaaagaccgcgaaagcggtcttttttgctgttatgcggtgagcttcagcccgacgataccgacgagcagcagccccacgaaaataagccgcgggacagtgacaggctcctggaaggccagaatgcccacgatgacggcgcccagggcgccgatacccgtccagataccgtaggcggtgcccatgggcagcgtcttcgtggcctgtgacaggaaaaagaagctggcgatcatgcccgcgactgcccataccgacggccacagctttgtaaagccctcagacagtttcagaaacgtagaccagaatacctccagcccgcctgcgatgaaaagatatacccacgccataccgattattacctccaaaaacaaaaaacgcgcccacaggacgcaccttctaagacctaacggcgcgcccgcgaacgcctgcccgtcacccggtggcggcggacagcacaggtactataccacgccgccgccacaaagtcaagcgatcctgcaccgcaacaaatgttcgaaaaaacaacttgtgacacatggagatatgtggtatactatgttgtcgagaatttacagttttagccgcaggaggggaggggtcatcatgggcttgcacgacgggcatcgccagcgcagcaaacgccggtatctggcgctgggtgcggagggactggaggatcaccagctgctggagctgctgctgttctacgccatcccccggcaggacaccaacgagacggcccaccggctcatccagcgctttggctcgctgcagggggtgctccacgccgcgccggaggagctgacctccgtagaaggcgtgggagaaaacgccgccgtgctggtgcggctggtcggcgacatggccctgcgggcccggtgctcgtccctgccccagaaggtgctgaactcccctgaccgcaccggcgcgtacttcatggagctgctggcgggggagaagaaggagatgctctaccaggtctgcctggacgccaagggcaagctgttgacctgccgctgcatcagcaagggcagcgtggccgcttcgccggtcagcgtgcgccaggtagtggagaatgccctgtatgccggcgccagcagcattatcctggcccacaaccaccccagcggcgtggctttgccctcccagcaggatctgctggtgacgcggcagatacaggaggcgctctcgccgctgaatattcgcctggccgaccacgtggtggtggctgacagcgattatgtctccatggcggaaagcggcctgctggcgcgatgaacggaggataccatgcctgatctgaaagtcgtttctgaataccagccggccggcgaccagccccaggccatcgataagctggcgcagggcctggaaaacggcctgcgcgcgcaagtgctcaagggcgtcaccggcagcggcaagacgtacaccatggccaaggtcatcgagcgtgtcaaccggcccacgctggtgctggcccataacaagacgctggccgcccagctgtgcgaggagttccgggaattcttccccaacaacgcggtggagtatttcgtttcctactacgactattaccagccggaggcctacgtgcctcagacggacacctatattgaaaaggacgcctccaccaacgaggagattgaccgcctgcggctgtccgccacctgcgcgctgctggagcggcgggacgtgatcgtggtggcgtcggtcagctgtatctacggcctgggcgagccggatgacttcgcccgcatgatgatctccctgcggaccggcatgacactggagcgcgacgagctgctgcggcggctggtggaggaccgctacgagcgcaacgatgtggccttccagcgcaatgtgttccgggtacggggcgacacggtggagctgtaccccgcctactataaggaccgggccatccgtgtggagttcttcggtgacgagatcgagcgtatcacggagttccatccggtcaccggcgcggccctgaagcagctgacgcacgtggcggtatatcccgccagccactacgtcacgcccaaggacaagctggagcgcgccgccaaagagatagagcacgagctggcggagcgcaaaaagtggttcgaggacaacggcaagctcatcgaggcccagcgcatcgaccagcgtacccgctacgacgtggagatgatgcgtaccctgggctactgctccggcattgaaaactattcccgggtcatctctcagcgtcctgtgggcagcgcgcccatgacgctgctggacttcttcccggaggatttcgtgctgttcgtggacgagagccatgtgaccctgccccaggtgcgggctatgtacaacggcgaccatgcccgcaagcagagcctggtggactacggcttccgcttgccctgcgcctttgataaccgccccctgaagttcgaggagttcgaggagcgcttttctcaggcggtgttcgtctccgccacccccggggactttgaaaagcagcaggcggaccagatcgtggagcaggtcatccgaccgaccggcctgctggaccccagagtggaggtccgcccggtgctgggccagatcgacgacctggtggcggagatacacgcccgggcggagaggaacgagcgcgtgctggtgaccaccctcaccaagaaaatggccgaggacctgaccgcccacttccgtgggctgggtatcaaggtgcggtatatgcacgccgacgtgtcggccctggagcgcatggagatcatccgcgacctgcgtctgggcgagttcgacgtgctggtgggtatcaacctgctgcgtgagggcttggacctgccggaggtgtcgttggtggccattctggacgccgacaaggagggcttccttcgcagcgagaccagcctgatccagaccatcggccgcgccgcccgcaacgccgagggtctggtcatcctgtacgccgataccgttaccccctccatgcgggccgctatggacgagacggagcgccgacggaagctgcaggacgacttcaacaaggcccacggcattatcccgcagaccatccgcaagagtgtccgcgagatggtggagatcagccacagcgccgaggaggcctccaagctgtcgaagaagaagctttccgaccgtgagcgagctgagaccatcgcacgtctggagaaggaaatgaaagaggccagccgtatgctggaattcgaatatgccgccctgctgcgtgaccagatcattgagctgcggggggagaaataaaccgaaccgagaaacgacctatgaaaaagtacctttcctatatctacgtgatcctcagcgccgtgtgctggggctttatcggtttttccaaccgtatgctcacggaggtgggcgtatcgctgggcaaccgggtgttcatccggaacttcggcacgctggtgatcctgaccatcgtgttcgccctgttccaccgtcaggtgttccgcatcaagctgaagcatctgcccattttcctgtgctccggactgctcagcatcctgacgctgagcctggtctacttccagtgccagaccatgtgttccctgtcggtggcggcggtgctgctgtatctggccccgtcctttgtggtcattttcagcgccgtgctgtggaagacaccgctgacgaagcgcaagctcatcgccctggtggtgtccctgctgggatgcgtgatggtcagcggcatcatcggcggcgatatgaccgcctcctgggcgggtatcggcctgggcgtgctgtccggcctgtgctacgccagctatacggtgtttgcccactacggtctggcccattacgagagctataccatgatctactggacatttctggtggcggggcttggctcggtatttttcgcggacttcgagacgctgccgctggccttttccggcacgcagggcatcgtgggcgtgtgcggtgtggtgatcgtggccacggtgctgccctacatcttctatacgaaggggcttgagggcgtggaaagcggccgcgcctcgatcattaccaacatcgagccggtggtggagacccttgtaggtgtgtttgtgttcaaggaggcgctgaccgtgtggacggtgctgggtatggcctgcgtgttcggctgcgtgatcctgctggccaatggagataaaaaatgcgaagaaaaacctgtcaagtcctgaacggctttcacctgaagctcatcgccgcctgcaccatgttcattgaccacatggggcacacgctgttcccaacggttttgtggctgcgctgcatcgggcggctcgcctttcccatcttctgctttctcatcgccgagggctgcgtctatacccgcgatcggaggaaatacgccctgcggctgctggcgtttgccctgctgtccgaagtccccttcgacctgatggtgggcggcacggtatggtatccctattcccagaacgtgctgtggacgctgttggccggtgcgctgatctgctggtgcgtcgattgggcgctgcgaaagaaaacgccggcggcctttttgctcaccggcgcggccgtggccgccgcattctgcctgctggagctggctgggacggactatcggggctggggtatgctgctggtggtgctgttctacggtgtccgccgcgtgtcctgcggcaccgtcgtgaagcgaacggcgcaggcggtgggactggcggtgttcagcatcggcattatgggcggcgtgtccatcgagctgtggtcgctggcggcactgctgcccctctggctctacaatggtcgtcgaggctattccaacccggtggtgcagtacggcttttacgccttttaccccgtgcatatcctgatactgtccctgatcgccctgtatgtgtaaacagataaggaggctggccctatggcaaagaacaaagaagaaaaaaccaacgtcatgcggacgctggatcagaagaaaataccctacaccgcccacagctacgacccggatggccccatcgatggcgtgtccgtggcgcagatactgggccagccgccggagcaggtgttcaaaacgctggtgacaaagggggccagcggggcatactatgtgttcgacatccctgtggccgagaacctggacctgaaaaaggccgccaaggcggtgggggagaagtccgtggcgatgctgccacagaaagagctgctgcccctgaccggctatgtccacggtgggtgcagcccggtgggcatgaaaaagcagtttcccaccgtgttccacgagacggcaccgctgtatggcgccatctgcgtcagcgcgggcaagatcggccaccaggtggagtgcgatcccaacgccctcatcgccctcctgcgggcgaaaacggctgacgtgatcgtataaaaattgtttcgctgttgacattaaaaattgatttcactacacttatctgcaaccatatgttgcagaaatgaggcataccatgcagactgaaattttcattaagggtgcgcgggagaacaatctgaagaacatcgatgtcaccatcccccgggataagctggtggtgctgacgggcctttccggctccggcaaaagctccctggcctttgacaccatctatgccgagggccagcggcggtatgtggagagcctgtcctcctacgcccgtatgttcctggggcagatggacaagcccgacgtggattacatcgagggcctgtccccggccatctccatcgaccagaagaccaccagcaagaacccgcgctccacggtgggcacggtgacggagatctacgactatctgcgtctgctgtgggcccgggtgggcacgccccactgcccccactgcggcaaggagatacgccgccagacggtggatcagatcatcgaccagatactggccctgcccgagggcacccgtatccaggtgatggccccggtggtgcgcggccgcaagggcgagcatgccaaggtgctggaggatgcccgccggtccggcttcgtccgggcccgggtggacggcaatatgtacgaactctccgaggacatctctctggagaagaacctcaagcaccgcatcgacatcgtggtggaccgactgatcgtccgcccggacatcacaggccggctgaccgactcagtggagacggcctccaacctggcgaatggcctcgtcaccgtcaacctgctgcgggaggagagagatatcaccttctcccagaactacgcctgtgacgactgcggtatctccatcgaggagctgacgccccgtctgttctccttcaacagtccctttggcgcctgccccacctgcaccggcctgggcctgcaattaaaggctgatccggccctcatcatccccgacggcagcaaatccatcctggagggcgccattactgccaccggctgggcctccatccggtccgacggcatcagtcgtatgtacttcgaggccctcagtaagaaataccgcttctctctgacccagccctacgacagcctaagcgacgaggtgaagaacgttatcctctacggcaccggcggcgaaaagctggagctccactatgaccagccccgtggcaagggtgtgctgtaccaggccttcgaggggatctgcaacaacctggagcgccggtatcaggagacccagtccgatgccagcaagaaggagatcgagggcctgatgaccccctgtccctgcccggcctgccagggtaagcgcctgcggccggaggcgctggccgtcaccgtgggcggcaagtccatctacgacgccactaccctgccggtggacgatgccctggcctttttcgaccatctggacctgaccggcaatcagcagatcatcgccgcccagatcctgaaggagatccacgcccgcctgggctttttgcagtccgtgggcctgagctatctgaccctctctcgtgcctccggcaccctgtccggcggtgagagccagcgtatccgcctggccacccagatcggcagcagcctcatgggcgtgctgtatatcctggacgagccctccatcggcctgcaccagcgggataacgacaagctgctggccacgctgcagcgcctccgcgatctgggcaataccctcatcgtggtggagcatgacgaggacaccatgcgcgccgccgattaccttattgacatcggtcccggcgccggtgccctgggcgggcaggtggtggcctgcggcactccggaggaagtcatggcgaaccccaacagcctgacgggccagtatctcagcggcaaacgcaccatccccctgccggcacagcgccgcaggggcaatggcaggctgctgaccgtccgcggcgcccgggagaacaacctgaagcatatcgacgtgtccatccctctggggacgttcacctgtgtcaccggcgtcagcggcagcggaaaatcctctctgatcaacgaggtgctgttcaaggcgctgggtgcccagctgaaccgcatgaaggtgcgccccggcaagcacgacgccatcgagggcatggagcagctggacaaggtcattgccatcgaccagagccccatcggccggacgccccgatccaatccggccacctataccaacctgttcaacctgatccgcgatctgttcgcctccaccccggacgccaaggcccggggctacggcccgggccggttctccttcaacaccaagggcggccgctgcgaggcctgcggcggcgacggtatgctgaagatcgagatgcacttcctgtcggacgtgtacgttccctgcgagatctgccgtggcaagcgctataaccgcgagacgctggaggtccgctacaagggcaaaaacatcgccgacgtgctggatatgaccgtggacgaggcgtgggagttcttctccgccgtgcccgccatctgtgacaagctgaccaccctgcgggatgtggggctgggctatgtgaagctgggccagcccagcaccaccctctccggcggcgaggcccagcgcgtcaagctggccacggagctgagccgccgcgccacagggcggacggtgtatattctggacgagcccaccaccggcctccacgccgatgacgtgcggaagctgttggaggtgctccagcggctcaccgacggcggcaatacggtgctggtcattgagcacaacctggacgtgatcaagtgtgccgactatatcatcgacctgggcccggagggcggcgtgggcggcggtacggtggtggcctgcggcacgccggaggagatcgccgcctgcccggcgtcctacaccggccagtatctgaaaaaatacctgaagtgaccggcctttcccctgccgcataggatagggcagggggggtggctgcatggagcttttacaggacggcgtggtcgccgcgctggcggccatcggcgtcacggcgctgatatggctggcggcgtcgctgctgctgtggcgtgagcgcccggtggacgcggtgtatctggtccgggtctccggagacgggacgggactggatgtgacgctgcgccgtctggcccagagccgccgtctgccggtgctgctggtggactgcggactgaccgacgagggccgccgcgccgcggcgctgctgtccgatatgaacacgaaattgctgacgccccaggagctggcggcgtactatacagaggaagataccgccgaacaggggaggtgagccgatgggcgagcgcgtgaccgtggagggcaccgtagaaaacgtcatctttcataacgaggagaacggctataccgtgctgctgctgaccgtggagggcgaggaggagcctgtcaccgtggtgggctgtatcccctgtgccgccgccggcgaaggcatgaccgtcaccggcgtgtggagcgtccatcccgtccacggcagccagctcaccgccgagagcgtggagcgccggatgccggagcgtgaggaggacatgatcgcctacctgtcctccggcatcctcaagggtattggtcccgccaccgctcagcggctggtggagcgcttcggcgcggacaccctgctggtcatcgagcgggagccggagtgcctgcggtgcatcaagggcatcaccgcccagagagcgaaggagctgtccgacgctttccgtgcgctgacgggcctgcgccagctgatggagttcctggcccggtatgacctgccggtgtatctggccatgccccttcagcgcacctacggcgacggagccatccaggccctgcgggacgatccgtatatcctgtcccgggcccagtacggggtggatttttccatagcggacgagatcgccatcagcctgggctttggcggggacgatccctgccgcctgcgggcggcgctgacctatgagctggagcacaacgccgccaacggccatgtgttcctgccccgcgagaagctgctcttcgccacgtcgcagatgctggccgtgacgccggacgagctggagctggcgctggacaagcttatcgagggcttcggcgtggtggaaaagaccatcgccggggtgcagggctgctatctgccccggctgtaccaggcggagaccttcgtggcggagcgcctgctgtcgctggtgcggacgccggtggaggtgctgccccgggcggagaaggtcatcgatgacattgaaaaggaacagggcgtggcctatgcgcctctgcagcggcaggcggtgtgtctggcggcccagggcggtatactgctgctgaccggcggccccggtaccggcaagaccacgtctctgcggggcatcgtgtctctgtacgagcatatgggcctggatgtggcgctgctggcgcccaccggccgcgccgccaagcgcctgggcgaggtgacgggccgggaggcccagactatccaccgtgccctgggcatgagctacaatgagctcaccggccagacggcctttaagaagaacgcacaggatccgctggaggtccacgctgtcatcgtggacgagatgagcatggtggatatcgagctgatgcgctccctgctggaggccatgcggccgggaagccgcctggtgctggtaggcgacccggaccagctgccctccgtaggccccggcagcgtgctgggggatatgctccgcagcggtgtggtgccggcggtgtccctgacccaggtgttccgtcaggcggagcagtcggccatcatccgcgccgcccacgccgtggaccgcggcgagctgccgccgctggagaacagcggcagcggcgacctcttcttcctgcgccgccgcgcgccggatcgtctggtgcagacggtggtggagctgtgccgcgaccgcctgcccaaaaacatgggtattcccgccgagcagatacaggtgctctcccccacccgaaagggcccctgcggtacggcggcgctgaaccgggccctgcaggcggcgctgaacccgccggagcgcggtaagcgccaaaagcagtggggcgacatgacgttccgggtgggtgaccgggtcatgcagacccggaacaactacgatgtgctgtgggagaaggaggatggctccggcggcagcggtattttcaacggcgacgtgggcgttattcaggacatcgaccccggcggcgagctcatcaccctgcggtttgacgaccgcacggcggtgtacaccgctgacctgctgagccagctggatatggcctacgccgtcaccgtacataaatcccagggcagcgagtatccggcggtgatattggccgcggcgtccgccgcgccgtcgctgctggtgcgcggcgtgctgtacaccgctatcacccgtgcccgcaggctgcttatcctcgccggggacgacgccgttctggcccagatggccgccaacaacaagcagcagcgccggtacagcggcctgcgccgccgactgaaggagggataccatgagcaataacggtagtatcaacgacgcattggacaaggcccagcggggcttgctggacttctttttcccccgcaagtgccccttctgcgggcgcgtggcgggccgggagctgctgtgcgaggcgtgcaaggcgtcgctgccccggtgcgataaggtacgcaccggcaccttcggcgaatgtgccgcgccgctgtattacgagggccgcgtccgcgacgcccttctggccttcaaattcaagcggcgcatcgaggacctgaacgcctacggtgtgctgatggccgaaaaggcggcggaggtctacgccgaccgcttcgatgccgtcacctgggtgccggtgagcaaacagcgcctgaaaaagcgtggcttcgaccagtcgcgtatgctgtgcgccagcctgtgcgtggactggcacacggagccgcaggagacactgcgtaaggtgcgggacaacccggcccagtccggtatcggtgacccggcggagcgccgggccaatgtgctgggcgcttacgagccggtggacccggacgccatcgccggaaagcgcttcctgctcatcgacgacatcatcaccaccggcgccacgctcaccgagtgcgtccgggtgctgaaggccgccggggcggcggacgtggtctgcctgacgctggccatggcccgtgataattgaggtatggacttcggcgtttccgtatagaatacagaaaataccgcgattttcatttcgcagttgcaatattctttctcaatcggtataatagataaatcagagggtaacgggcgcacccgcccgaaacgaaagacaagatagaggtgcagtagtatgtgttccattgcaaaagatatcggcatcgacctgggcaccgcctccgtactggtgtacgtaaagggcaagggcgtcgtgttgaacgagccgtccgtggtggccattgacaagaataccggcaagctgctgaaggtgggcgccgaggcccaggccatgctgggccgtacccccggcaatatcgtggccatccgccccctgcgagagggcgtgatctccgactacgacatgaccgagcgtatgctccgcgagttcctgcacaaggtggtgggcggcttccagctgttcaagccccgcgtcatcatctgcgtgccctccggcatcaccgaggtcgaggagcgtgccgtggtggacgccggcatccaggcgggcgcccgccgcgtgtatctgatcgaggagcctgtggccgcggccatcggcgccggaatcgacatctccaagcccgacggccacatggtggtggatatcggcggcggcaccagcgacatcgccgtcatctccctctccggcgtggtggagagcgcctccatcaaggtggccggcgaccagttcaacgaggccatcgtcaagtatatgcgccgcaagcacaacgtgctggtgggcgagcgcaccgccgagctgatgaaaatgcagatcggctgtgtcttccccaaggagcaggagacgtccatcgagatcaagggccgctgcctggtgacaggtctgcccaaggtcatcaacgtcagctccaccgagatgctggaggcattcgaggagccggtagagcgcatcctcgaggcggtccacggcgtgctggagcgcaccccgcccgagctggtggccgacatctccaacaacggcatcgttatgaccggcggcggcagcctggtggacggctttgacaagctgatcgaggcccgcaccggcatccacaccgtggtggccgagggcgccatctcctgcgtggccgagggcaccggccgcagcctggactccctgaattccatgaccgacggcaccgtgaacctgagccgccgcaagcagatgagctaagcacaatacagaaggccgccaaagggcggcctttttctcaagttgctcttgcaacttccacgaaaaagcgctactattacgatacacgagaacgagataaggaggaaccaccatgaagttttccagcaaggtcttgaaatgcggcctgtcccccatgcggaagttccacccctacgcggtggcggccgaggccaagggcaggaagatctatcatctgaacatcggccagccggatatcgagacgcccaaggcgtacttcgatgcggtgaagcactttgacctgccggtgttggcctatgccccgtcccccggcatcccggagctgatcgaggccatccgcaagtactacgccgatctgggtatgcacttcgatgccggtgatatcctcatcaccaacggcggcagcgaggcgctgcagatcaccatgaactgcatcctggatgacggcgatgagatcctcatccccgagcccttctatcccaactacaacaccatggcctacacctgcggcgcgaagatccaccccatccccacctctccccacgacggctaccactacgccgaccgcgccaaggtcgaggcggagatcaacgagcacacccgcgccatcatggtcaccaaccccggcaaccccaccggcgccgtcctgacgccggaggagatgcgtatgctggtggacgtggccaaggcccacgacctgttcatcatcggcgacgaggcctaccgcgagttcgtctacgccggcgagcctctgcaatccatgggtcagttcgaggacgcggccgagaacgtcatcgtcatcgacaccgtctccaagcggttctccgcctgcggcgcccgcatcggctgtatgatctcccgcaacaaggagctgatggcccaggccatgaagtacgcccagtgccgtctgtccgtgcccacgctggaccaggtggccgccgctgcgctgtacaccgtcggccccgactactttgccgccgtccgtgaggagtacaagcgccgccgcgatacggtggtcaataagctgcacgagatacccggcatggtctgcgagtgcccccgcggcgccttctacatcatggccgccctgcctgtggacgatgccgatgccttccagaagtggctgctggaggagttcgaggacaacggcgacaccgtgatgttcgcccccggcgaacccttctacggcacccccggcaagggcaagaacgagatccgcatcgcctatgtgctgaagcaggcggacctggagcgcgccatggacctgctggccaagggcatcgccgcctacaacgcccggtaaactgatatacgcaaaaaaagaaagcccttttgggctttctttttttgcgtatcttatcccttcagcaccatatcgcagcgtgcgggcaggtcaaaggcggcgaaataggcctcctccagcgggatccagcgatcccggaacatccggagcttctccgggccgctgcgggcttcaatgcggcggagctgctcggcagcgtccacggtaaggaatacccgcaggtcgtagctgtcccacagggccggatggcaggcgtaggcgccctccacgatggtcaggcgcgccgccgggaccgtcaccggctcgtccagcgcctgccgcgcacagcggaaggggcggtaggtgaccgcctcaccgcgcagtgccggctgcagcacttccgatagaaagcgctcgtggtccacgttttcgcccggctgtgccagccgtgcggcggtgcgctgctccgggcgcagaaagaagtcgtccatgtggaacacccggcaggacagctgcgcctgcagctgtgccgccagcgtgcttttcccggcgccgcagcggccgtcgatggccgcgatgacccgcgtctgccggtccagcagcgcccggataaccgtcagcaggcggtcgtagtcagcaggggtcatttcgccctccgggcggcgcggcgctggatgagcttcaccagctccaccaccggaaggaccaggaaggccagagccagggccacgccgtactccgtccagctgacgggggtgaagccgaaagcgttggcgatgacgggcacctccagcaccagtgttgtcagagccagcgagccgatcatcgcgccccacagtaccttgttgtggctgggcagcgagaacacgctcttgcgctgggagcgcatattgaagctgtggaagatttcacacatgctcatggtcaggaaggccatggtcataccgtcgtcggacacgcccttgggcatctcaaaatagcccacctccatgcagtgcccgatgatgtaggaggtcatggtgatgatcgtgatcagcacgccctgatacaggatgtcaaagcccaggccaccggcgaagatgccgtccttgctgtcccggggcgggcgggtcatggtatccggctcacccttctccagaccaagggccagggcggggaagcagtcggtgatcaggttgataaacagcaggtgcaccgggttcagcagtgtgaagcccagcagcgtggcgaagaacacgcccagcacctcgctcatgttgctggccagcaggaactggatggccttgcgtatgttgtcatagatccggcggccctcctccacggcggtgacgatggtggcgaagttgtcgtcgctgagcaccatgtccgccacgtttttcgtcacgtccgtgccggtgatgcccatgcccacgccgatatccgcagacttgatggagggcgcgtcgttgacgccgtcgccggtcatggcagtgatggcgcccttgcgccgccaggcgttgacgatgcggaccttatgctccggctgcacccgggcatagacgctgtacttctccaccgccttgtccagctcctcatcggtgaggctgtccagcgcgctgccggtaacggcctggctggcgtcggtgatgatgcccagctccttgccgatggccacggcggtatccttgtggtcgccggtgatcatcaccgggcggatgcccgcggcgcggcactcggccacggcggccttgacctccgggcggatggggtcgatcatgcccgccagaccgatgaagcagaggtcctgctccaggtcctccggctcctgtcggtcgggcagcgcgtcgtacaggcgctccgccgccgccaggacccgcagggccttgtcggccatggccttgttctccgccagaatggcggtgcgcttttcctcagtcaggggcaggatctgcccgctttccgtatagctggtgcaccggcgcagtacctcgtccggcgcgccctttgtgtactgaataaagccgttgtctgtgcggtggatggtggacatcatcttccggccggagtcaaagggggcctcgccgcagcggggctggcggctctccagcacaggcttcttcagcccctgggcagcggcaaagttcaccagcgccgcctccgtgggctcaccgatggcgccgttctcctccagcgcggcgtcgttgcacagcgccatggctgtggccagcagctccgtggggccggtgtgctccaccacggtcatcttgttctgtgtcagggtgccggtcttgtcggagcagatgacctgggtgcagcccagcgtctccaccgccgtcagccgccggatcacggcgtgctgcttgctcatgttggtcacgccgatgctcagcaccaccgtcaccaccgtggccagtccctccgggatggccgccaccgccagggaaacggccaccataaacgtgctcagcacggtgtccagcgtgaactcgccggccaccaccaggtcaaagataaagatgaacacgcagatgcccagcaccagcttgctcatggtcttgcccagctcattcagcttgcgctgcaggggcgtctgctcctgctccgtctgggccagcacaccggcgatcttgcccatctccgtgtccatgccggtggcggtgatgaccgccttgccgcggccgtagaccacggtgctgcccatgtagcacatattcttccggtcgcccaggggcacgttgtctccggtcagcagccccaccgccttagtcacagggacgctctcgccggtcagcgccgcctcctcgatcttcatggaggcgctctccagcagccgtccgtcggcgggcacggcatcgccggcctccagcagcaccacgtcgccgggcaccagctggctgctctcgatgaccacctggtggccgtcccgcagcaccttgcacttggcggcggtcatggtctgcagggcctcaatggccgcctcggccttgctctcctgcaccacgcccagcaccgcgttcagcagcaccaccaccaggatgatgaacacctcggtgaagctctcgccgctgagtgcgttggtcacggcggacaccgccgccgctgccatcaggatcagcagcatggggtccttcagctgtgccaggaaccgctgcagcagggagggcttctccgcctccttcagcttattggggccgtgcttggccagacgttcagccgcctccgcctctgtcagaccggtgggacaggagcccagctcctccagcacctcctgcggactgcggttgtattccttttccatcgtctattactcctttatatcatggttttataatttgaagcaaaaaagcagaacaaaaagcgaaacagaaaataaaccaaaagacaacaaaaaactcatgcacggacaggctatgtctgtgcatgagtctcattctttcaggacacatcgggcgctgccgcgccgggatgacggtgtgccacgccgcgccaaaaccggcgctgcggaattactccctcattcattatggggtattttacccgcttttttacccgctgtcaaccccaaaaagggcggttttttacaccatttccgcggcgcacagaccatcgaaatacttgtacagcggcatcagtgtccggaagccctcaatgatatcctgtgccagttccggcgagaacatacgctcgtccggtgcggcgtcatgttgtaaattgatagacttcttgttgtaccacgccgccagcaggggagagggggcggtctttttcctggcatattccgggcctgaaagcgtgaattgcgcctgtttattgaaccttttgaccagcttttccagcacctcgggatgctcgtcgacggccttgcggtacgcttccatcagcgccgccttcggcgcccaaaagcccatgccgtagctgtaatagtccggcccgatctcaaagtaaaacgtgggccgccccgtccagtcctcgccgccggcgcggacgcagaaccacaggtggtccttgtacggtccattcccgtgcagccgtcgggcatcccgatagatgcgggagagcttcagcagaaacggctccttggggaatgccgcgtgcagggcttcatacacctgctcgcccagcgcacgggtgggggccaggagatgtgcctcatagtcctgcttatgcgccagaaaccaggagcgttcgttgttgaaccgaatgccccacagaaagtccagtgtctcctgtgtatagccttcaaaagccatgctatgtactccttttaattaaagcgctcacatgaatttgcacagcagaacgggcagcagtagcgccggcgtcatgttcaggatacgcagcttggtgacgcccagcacgttcagggtgatgccgatgatcatcagtgacccggtgacggagatctcggtgatgaccgcatcggtcagcacccctgtcagcagggaggccagcagcgtcatcacaccttccaccgccagcaccgacaatccggaaaagacgatcccgatgcccatggagctggcaaaggccacggatccggcaaagtcgatgaccgacttggccagcaggatgccgtggtcgttcttcagaccactgtccagcgaacccatcaccgccatagcgcccacggcgaacaccagcgagccgctgacgaagccgtcggtgatgggacccattttcccgaatttcttttgcagccagtcgcccgcccgggtgacgccgtcctcaatgtgcagcagctcgccgatgacggcgccgatgaccagcgacagtatggggatgagctggttgctgctgccgatggcgccggagatgccgatgcccatggacaccagcgccgtagcaccaagcaccgtctgccgcattttttccggcatgagcttgccgccgaaggtgcccagcaggccgccgacaacaatggctccaccgttgaccagcgcgcctgttaatatcatggtacaagacctccatcttcgataatatcccgcaccaccgtgccgcccatcatcaggccggccacagagggcacccacgccacgctggcgggaacgctgcgccgtccgggtgacggcgcttccagctgctgtgtctcgtggggcagctccgggctgaacaccaccttcaggtggtggatcccccgggcgcgcagctccttccgcatgacccgggccagcgggcagccgctggtcttggagatatccgtgacccgcagcagctcgggctccagcttgttgccggtgcccagggccgacaggatgggaattccccgtaggcgggcctgttggatcaggtccagcttgcagctgaccaggtcgatgcagtccacgatgtaatcgaatttccgggagaaaaattcctcccgatgggcggcgtcataggtggcgcagatcgggtatactaccgtgtccgggtcgatgtcccgcacacgtgccgccgcgacttccgccttgtactgccccacggtggaggtcagcgcgcacagctggcggttgatgttggatacggataccgtgtcctggtccaccagcgtcaacgtgccaacgccgctgcgtgccaggcactcagcggcgtagctgcccacaccgcccagaccaaacaccgccacatggctgcggcggagcttgtccaaggcgggtgcgcccaatatcatttctgttctgagaaaacgctcgttcatagactcgaagaaggggcggtcatcagcccacgtgcttcatgccgttctcctgcaccacatcggcgctgtccagcagaccgtccagccaggcctcggtgtcggtgttgcgcagagcgttctcggcctgtacctgccagtagggcacatcgtcgcccacaaagtatatcacatgatagcccttgtagttagagctctcaccgtatacgatgccggtatcgccggactgacggctcgcatcgaagcaccagtcgttgaactcggtgaccatctggtttttgtagatcttggtgtacagaccgccgttggtgttgctgccggcatcggtgctgagctcgttggccagggccgcgaagctgtcctcggtggcctcgccggccttccactgggccagcgcgtcctcggctgcggtcttggccgcgtccttagccgcctgcaggtcggcctcataggtctcggcctcgctgtccagtgcgctctcgtctaccttgaacaggatgtggcgcacgtccttggtggcgtattcctgacggcccacgctgcggaacacgaccacatagcagttggaatcgctggccacaacggcgctgtcaccggccttgcgcgcgctgtcaaatacccagttggccacgtcgctgccgttgttgctgccggcatcggtgctggtgtagctggcggactcataatccttggccacatcctccagcgcctcgccgccctgcacgcgcgccagcacagcggcggcatcgctctcggccttggccttggcggcagcgttctcctcatcggtgggctccacggtgttgccgtcgtcgtccttggtgctgtcggcggtacccttgaagtacagggactcatagctggccacgtcaaagctgctcttgttgccctgatagtaggtctccaggtcgctgacggtgtaggtcagctcctcggcgtagtggctctggtaatgggtggccacgtccaccagctgcaccatctccttgaaggtatccacggtcatgttcttgccgtagatcagcttcagatacgtcttcgtggagtagccgttctgcttggcggcggcgttgagctcctccatagtggcatccagctcctcctgagtgtgctcatcggcgcccatgccgttggcctcagcctcctgggcggtcagcacgtacatggccagctgcttcaccgcggtgtcgcggacatactgctcccatgtgacatcaccctcgtcctcgatacccagcgcggtcttcatggtgtcgctcaccacctgctggtccagggatttggacgtatcgatgccgtaaaagctggcatagccgctcttcaacagactgctcttcacgttggcgtagaaatactccacctgcccggcggtatatttctcaccgttgatggtcacggcggtggcgctgcgctgcagcacgccggagttatacaccagcagtaccgcggccacgatcacgaacacgccggcgatcacgccgtacaggatattgttcttgcgtgccttggccttctcctccgcctcgcggatcttcttggggtcggtgacgccctgggccgccagatcctgccggatcttcttttctcttgatgcgctcattgaaattcattcctctcgattttgggcgcaatacgcccttgtttggtaacatactcggtcattatatcgtataccgcaccttttcgcaagagggaaacgcctggaatttgtgaacattttaccgcgctcactgagcacaagacccccattccgtttcggaatgggggtcttgtgctcagcgacaggcagcggccatgttataacctgcacaactcgcaggtgggtcgtctccggctgactttactgcttccagcatccgcccgcatacggcaggcgggaggcctgcaaaccatctgccgatccgacgtcccgtataaccaatgtcaggataaatagaaccgctgcccatcgctcaattttccgccctgccttcgtcaaatcggctcgacgtacagaaagtacgccatcgccgctttgccatcggcaggacgaaaaatcctgccgaaggagtggcgtgtatctttttcgctgcaccgccgcgcctcgtcttggcgaaaaatccagccattttccggcgtagccggcggcgtctcgccatcggcaggacgaaaaatcccgtcgaaagatcactcgtcctcgtcggacaggatctgctccatgaacaggtcgtagactttatccagctcctcatcgctgtccagggtgctcagcagctcctcgccgttttccataacggacttcaggatcaccaggccgtactcctcggcggcttcctcgtcggcatcatcctccaccacggggaagaacgccatgtaggtctggccgtccagctccagcgcgtccacgtattccagttcaatgtcgttgccgtcctcgtcggtcagggtgatgaagttggggccgaattcctcgctcatgggagagtcctcctttgtctttatatccatagtatacccgaaagctggagaaaacgcaagtggaagcgttcggcagtttctgccatctgtcggactgaaaatcggtggaatgggggaaaataacgggaattgagcagccaaacgggcggatttctgcaaaaaatcctcttttttgcatttgacaagtatggtagaatgttccttatagtggattggtatgtgaattttgaccccggaacgaaaagaatacacaggaacatcaataaagaaaggaaggtgccctgtcttgagtgagaacaagcgcagacggtcgtcgtccaccggcttttggggacgcatccggcagagcgcccggcacatagaaaatgaggcaaaggagggtgcgcgccgggtagagcacagtgccgccgagggtgcgcggcgcgtgcagcatgacgcgcaggagcgtgtgcggaacatgacccctaagcagaagaacggctggaagaaggccggacgcatcatcggcacgctgctgctggtgttcgtgcttacggcgtccatcttcgccggtatcttcatggcgtacatcaacagcgccatgcgcggcaaggtggaggtctatctggacgaattcgagacccaggtctccaccgagctgtattaccaggaccccgacacccaggagtgggtcatgtaccagacgctgtacatggacgaaaaccgcatctgggtggacctggagaacattcccaagtatttgcaggaggccgccatcgccatcgaggacaagcggtttgagaagcaccacggcgtggactggaagggtaccacccgcgccattctgtacaccctgttcggcaagaacgtgcagggcggctccaccatcacccagcagctggtgaagaacgtcaccggcgacaatcaggtgacggtcaagcgcaagatcacggagatctaccgcgcactggagctggaaaagcgctatgagaaggacgagatccttgaagcctacctgaacgaggtctacttcggccagcgctgctccggcgtgatgacggcggcgcgggtgtattttggcaaggacgtgtccgagctgtcgctggccgagtgtgccagcatgatgggcatcaccaacaacccctccatgtacgatcccttcatcagctcctggacccgcgagaacaaccgggagcgccagctgaccatcctcagcgagatgctctctcagggcaagatcgaccaggaagagtatgacgccgccgtggccgaggatatccagtttgccaacggcttcaccatctccggcaagtatgtgggcagcgacggtaccgtcaccgagctggacacggaggataccaccgataccagcgacgataccgactccccggcggatgacagcacccccaccatcaagggcagcaactcctggttcaccgatgccatgatcaccgatgtggccgaggcactggtggagaagctgggcatcaccgaaaaggtcaacagcgagggcaagaaggtctccgcctacgaccaggccatcaacatggtctacagcaggggctacaagatctacaccacccagaaccccaagtaccagcagatcgccgaggaggtctgctataatctggagaatatcccctataccagcagctatacgaacgccgccggtgagcaggtggaggatcagctgcagatcgccctgaccatcgtggatcccaccaacggttatgtggtggctatgatcggcggtgccggtgaaaaggtggtggaccgcggctggaactgggctgtgaacgcccggcagtgcggttctgccatcaagcctgtgtccacctacgccccggcactggacgacggcaccatcaacggcgcgtcggtcatcgacgactatcccatgctgctcaacggcgaggtctggccccgcaacgccaactggcgctatcagggcctgacggcgctgcacaccgccatcgcccagtccctgaatacctgtgccgtgcggacgaacctggcctacggcgtcagcaattcctacgacttcctggtggacaagctgggcttcgagaacctgacctacaccgactcccagcaggtgggcaacatggctctgggcggctttgagaagggcgtcaccaccgaggagatgtccgcggccttcgcgaccttcgtcaacgagggcgtgtacaccaagccccgtaccttcatccgtgtggaggacgccaacggcaacgtggtgctggagaacgaggcccagtccaccgtggccatgaagaacaccacggcggctatcatcaaccatctgctgcaggaggccgccctgaacggtaccggctacgaggcacagttcagcggtatgcacatcgccggcaagaccggttctaccaacagcaacaaggaccgttacttcgtgggctacacgccctattacagctgcgccgtctgggcgggctacgagcacaaccagcgcatcgtggccagcggcaacccctgctccgctgtgttccgcaaggtcatgagcgccatccacgaggacctgcccaacaaggacttcttctcctgctccggcctgaccagcgtatcggtctgtgctgacagcggaatgctggcatcggagaactgcgccctggacgtccgcggcagccgcgtctacacggccctggtggcggcggataacgcccccaccgccgtctgcaccatgcacaccgcccccacctacaccgtcaacatggcggacagcgacggcaacgtgaccaccgttaccggctccgtgctgaactaccagcgtgagctgatcgagggccacgacgagatcgtggtggaggacgcctttatgatgcagggcggatggaacggcttttttggcgacgaggcggacgacgacttcaatatgccggacggcgaccacgatgatgctatggacggtccgccggataacggtgtaccggatatgggcggatttatcggttgactgtttacaagcaaaaaaggagacggcctttgccgtctccttttttgtcccggagtgggtgccatgtcaagggccgccgctggcggccttggttttcgcgcagcaaaatcgccgcaccaaaagaaaagagacatccgaaaggatgtctcttttcttttggtgcgcgaggcgggacttgaacccgcacgcccgtaatgagcactagaacctgaatctagcgagtctgccaattccaccactcgcgcgtcgaacaagtgagattatagtatgtaccggctgaattgtcaaccccttttttcaaaatttccaaacttattgttttccggcgcgttcatgccttgacctgccgcccaaaacttgttatgatagaaaaaaccattcaccgaaggagtgcgtatatctctatgaaaaaggagcttaccccccggaaaaaacaggccctggaaatgcgtagtcgtatccagaacgtagcgctggagctgttcgacaaggagggctttgagaatgtctctgtggagcagatcgcccaggcggtgggctgctccgtgggcaacatctaccactatttcaagagcaaagacgagctggtcatccaggtgaccagcagcgtggacgcccagtacagcgtgctggaggcgagttacctggccgacgaggccaactcctggcacgataagctgctggactttgtgggtcagaccctggtcatcagcgccgaggacccgtccctctaccgcagctttatccacggcatccgctatccccagcagggcatcctgcgggacaacgagaagcgcgtgtatttccgcgttctgcgtgagctggtggacggctgcaagcaggagggcacgatccaccacgaccgcgaccgcgaggagctggtggcggacctggtggccctgcaccgcggtatgctgctggagtggcgtatctacgaaggtgctttcgacctgccccgccgcggccgccgtatggccgccgcgctgctggagggctggcggcacgaggagtgagtagaggcatacacagaaaaggaggagcggatgggtaagagtgaagagaggcggccgccggagagtgggcgggagccgggcgaaaacacagctgttgcgggcttgataatgggcattgccgccgtggtattctggtttttcggctactctgccgtggcatctgttgtactgggcatcctcggcttggtatggactgacaaggcaaagaaagagggctataccggagacaagcgaacgatagccttcgtgctgtcgctggtgggtcttatcggcgggctggttgtgcttatcattacggtgatcctcatcaatgtgctggcagtaccggggataacggccttgagggatatgctgggaatgataggcgaaatggcaaatgatatctgagcggacagccctgcggcacgaggaataagttaaagaccgtgaacgttgttttcaacagcgctcgcggtctttttttgtgcgaaacgccgacttttcggaaatgccaaaatcgccgttgacatcccggatcagcggtgccataataaagtataatcaccgagtggttcggtgaaaagtttaacgaaaaccgcccgccgggcgtgacagaaaaggagagagactatgaagctgttgatcatcaaccccggcgcaacctccaccaagatcgcggtgttcgaggacgaggaacagctcttcaaagtgaccatcgaccactccgccgaggagctggaccgcttcccccgggtcatcgaccaggcggactaccgtaaggaggccattctcaaggccgtcaccgaggccggttataagctgtccgactttgccgccgtctgcggccgcggcggtctgtaccgggccattccctccggcacctacgccgtcaacgacaaggtcatggccgacgtagaggccgcgccctacggcgagcatccctccaacctgggcgcttacctggcccgtaagctgggcgacatggtgggcattcccgccttctttgtggacccggtctgcgtggacgagatgaccgaggtggcgcactacaccggctttaccgagttccgccgtctgtgccagttccacgccctgaaccacaaggccgtgggccgcaaggccgccgagaagctgggcaaaaagtatgaggacgtgaacctcatcgtctgccacctgggcggcggcgtcagcgtgggtgcgcatcagcacggccgcgtggtggatgtctgcaacgtcaaggacgagggcgccatgggcatggaccgcgccggcggcctgccggtgaaccagctcatcaactactgcttctccggtaagaccaaggacgaggtcaagcgtaccttcggccgccgcgccggtatgttctcctatctgggcaccaccgatttccgcgtggtctgcgccaaggtggtggagggcgaccccaaggccgtggaggcctatcaggccctggtctaccagctggccaaggacatcggtgccatggccgccgtgctgcacttcgacgtggacgccatcgtctacaccgccggcatggcctatgaggacttcttctgcgacgacatcaccgcctatgtgggcaagatcgcgcccatcatccgcctgcccggcgaggaggagatgcgctccctggcggagggtgccctccgggtcctccgcggccagcaggaggccggccagtattgatctgatattccggcaggaatatagataaaccgtttttgatttgcaagtggaaataagaggaaaaagacaagaaaggtggaaactgctatgaaacatctgatgtccggtaacgaggccaccgcccgcggcgtctacgaagccggtatcaaggtctgttccgcgtatcccggaacccccagcaccgagatcctggagaacctgccccagtacggcaaggacgtgtactgtgagtgggcccccaacgagaaggtcgccaccgaggtggcctacggcgcgtccgtggccggctcccgttccttctgcaccatgaagatggtgggcctgaacgtggccgccgaccccctgttcaccgccggctacatgggcgtcaacggcgcctacgtggtcgtcaccgccgacgatccctcctgccactcctcccagaatgagcaggacaaccgccactacgcccgcgccgccaagatcgccatggtggagcccagcgacgcccaggagtgcaaggactttgtccgcctggcctgcgagatctccgaggagttcgacacccccgtgctgtaccgcaccaccacccgcgtctgtcacagcaagggcctggtggagttcggcgagcgtgtggagcacgtggcccccacctacgcccgcaacacccgtaagtacgtctgcgcccccgccaacgcctacctgaaccaccccatcgtggaggagcgcctggtgaagctggctgagtacggctgtacccgcgccctggagaacggcctgaacaaggtggaactgggcgacggcaaggtgggcgtcatcaccgcctccatcagctaccagtacgccaaggaggtgttccccgagggtacgtccttcctgaagctgggtctgacctatccgctgcccatggacctgatccgcgactttgccaagaaggtggagaagctctacatcatcgaggagctggaccccttcatggaggacgagatcaaggccgccggcatcgactgcgtcggcaaggaactgaccggcaagctgtatgagctgaacaccgagctggtgcgcgagcgcgtgctgggcatcaagcccgcgtacaagaccgtggacgaggtcaaggtcgccaagcgtccccccgcactgtgtcccggctgcccccaccgcggcttcttctacaccctgtccaagaacaagaactatgtggtcaccggcgacatcggctgctacaccctgggcttcgcgcctccgctgaactgcatggacgtgtgcatctgcatgggcggcggcttctccgccggcatgggcatggccaagtccttccagcgcgagggcgtcaccgataaggtggtcttcggcgtcatgggcgactccacgttcttccactccggcatgaccggcgcggccgagatcatctacaacaacggccgcatgatcccctgcgtgctggataaccgcatcaccggcatgaccggccaccaggacaaccccggctccggcttcaccctgatgggcgagcccgcccccatgatcagcgtggagaaggtgctggaggcctatggcttcgcccctgtcttcaccgtggatcctcaggacctgaccgccatgaagaagaccgtggacgacgctgtggccgccctgaacgagggcaagcaccccgccatcgtcacccgtcgtccctgcctgcttatcaagcgcgtgaagcacgacaccggtatgtgcgtcgtcaacgccgacaagtgcaagagctgcaagagctgcctgaaggtgggctgccccgccatctccatggagaacggcaaggcgttcatcgaccgtacccagtgcgtgggctgcaccgtctgtgcccaggcctgcccctttggtgctattgaaaaggaggagaagtaacatgaacgatgtgaaaagctgcctgttggtcggcgttggcggtcagggcgccatcctgatctctaagatcatgtccaacggctttatgaaggccggttacgatgtcaagcagagcgaagtccacggcatggcccagcgcggcggctccgtgtccacccaggtccgctggggcaagaaggtctacggccccgtgttcggcaagggcgaggccgatatcatggtggcgctggagaaaatggaggctgtccgctatgcggagttcctgaaccccaacggcgtggccgtcatcaatgactacgccatcaagtccaccaccatcgcctccggtgccgaggcgtatcccgagggctgcatcgaggccatgcagaagaactttaaaaccatcgccgtccccgccagcgatatcgccattgagctgggcaatcccaagtgcatgaacgtggtgcttttcggtgccatgtgtgactccctgggctgccccgagatcgactgggagcaggtcgtggccgagacggtccccgccaaggtcaaggagctgaacctcaaggccttccgcgccggccgtgaagccgccaaggccgctaagtaaaccgataccgcaaaaaggaccgccttccggcggtccttttttgcacctaccccaagccttcatctgaggatcagcggggaagacaggcacccctgaaggacgcccccattcgccttccccttgggggtccgcggtgttgaatgacacgccggtggcgtgtcagacccgcggaccgaccgacccgcagggagacaggtggcgcgcagcgccggatgaggggtccctcgtcctcaccgcggcggcgaaactcccgccgcgggaatttatttgttgcactccgtctcgcgctgcattataatggacaaaaaatcaggaacgaggtgtatcaccatgacctatggctttatcggcaccggcaacatgggcggggcgctggcccgcgccctggtcagggaagtctctccctcagatgtgtatctcaacaaccgcacgcccgccaaggcggagaccctggcagcagagctgggagcccgggcggacaccgctgcccacatcgccgctgcctgtgactatatcttcctgggcgtcaagcccaacctcatcgccggcgtgctggcccagttggcccccacgctggcacagcggacggacaagcccgtgctggtgtccatggccgccggcgtcaccatcgccgcgctggagcaggctgctcccggctgccccatcctgcgtatcatgcccaacaccgcctgcgccgtgggggcggggctgacgctgtacgatgccaacgccctgctgacgaaaccacagctggacgccttcctggcggacatggccgcctccgggcggctggaggctctgccggagcacctgatcgacgcgggcagcgccgtggccggctgcggcggtgcctttgcctgcctgttcatggagggactggccgacggtgccgtcacctgcggcctgccccgtgacaaggccaatacctttgcggcccagatgctgctgggcgcggcccggctggccctggagagcggcaagcccttcgggcagatgaaggacgagatctgttcccccggtggcaccaccattgccggtgtccgcgcgctggaggagggcggcctccgcgccgccgccatgaacgccgtcattgccgcctacgaaaagacccttcagctgaagaagtgaaccacgccgcccccggctcagccgggggcggcgtatcgtgtaaagaaaggccctccccaccggggagggcctttgtccttattttccgtacaggcagtagatgagccagttcaaaaaccgtgccggcagcaccttggccaggaaggtgaagaacttgtagtcgaagcgtatggcgtacagcgggtggtggtgtccctcccgcatggctacgctggcgatgtacgccccggccttggccgggtccatgcccgtctcctcatcgtgctccatgcgtttcacggaccgggaaatgcgtccctgatagatgtcgtccccggcgctgaccttccgccgcgcggcggtaaagcccgtgtggatatcccccggcatcacggcgcataccgttacgccgaagggccgcagctcgttggccagcgccatggtgtaggcgttgacagccgccttggtggcggagtaataggcctggaaggggatgggcaccggtgcggccacggagctcaggttcacgatccttccccggcccgcctgccgcatcaggggcaccacggcccggttcatgttcaccatgccgaagaagttgacgtcgaacagcgccttagcctccgccgtctccgtgaactcgatagccccggagatgccgaagcccgcgttgttcaccagcacgtcgatgtgcccctccgccgccatgatctgcgccacggcatcgttgacggcctgctggtccgtcacgtcggcggagatgtggtgcagaccctccacgccctccgcccggcgggacagctcatacacggtatagcccgcgtccttcagcgccagggcggtagcccgtccgatgccggaggtgccgccggtgacgacagcgaccttactcacgggccatcacctccccgatgatgtccatggcctcgtccagcagggcctccgtgtgggtggccatatagctggtccgcagcagtgcctcaccctccggcgtggccggcggcagcgtggggttcacatatacgccccggtcatagatctccgccgctacccgcagcgtccggtacgtctcataggtgtagatggggatgataggcgtaggcgcctccagcgccgagggccggatggtcagtccccggtccgtcagccccttccgggcatacagactcagggcacgcaggcgctccggcagctccggatgcgcctccagcttccgcagggccgagagcgccgtggcgcagttggccggcgggatggacgccgagaagatgaacggccgcgatgcgtgccgcacgaaatccgccacctccgcgctggcggccatatagccgcccagcgacgccagcgacttggagaaggtccccatgtacacgtccacctggtcctccaggccaaagtagctggccgtgccccggccgccctcgcccagcacgcccagcccgtgagcgtcgtccaccatgacccgtgcgccgtactgcttcgccagggcgcagatctccggcagcttggcgatgtcgccgcccatggagaacacaccgtcggtgacgatcagcgctccggccgtctccggcaccttctgcaggcacttttccagctccgccatgtcgctgtggcgatagcgcagcattttgccgtaggacagctggcacccggcgtagatgctggcgtggttctcccggtcacagatcacgtagtcgtgccgccccaccagcgcggagataatgcccacgttggactggaacccggtgccgaaggtcaccacccccggcttccgcaggaacctcgccagctccgcctccagctccagatgcatctccagcgtgccgttgaggaaccgcgacccggagcacccggtgccgtactgctccagcgcccggatgccggcctcgatgacctccgggtccgtagtcagtcccagatagttgttggagcccagcatgatgcggcgcttgccctccatctgcacctccacatcctgccgggactgcagggcgtgaaagtaggggtacacgcccttttccttcaattcccccgccagggacggcgcaaagcacttctcaaagatatccatacaagacctctctatctgatatagaatattagcattaacgggaacttaacaagctgatatcgctttttttgaatgaaaatattatataggcagatagaaaacttgtcaacgtctacttgcgtcagcgttcctgtccgtcgataacgtccagcagccgcagaatgccccggctcagcgccgccgccccgcacaccgtgcagatcatcgtgatggctgtcataaaaacgtcctccttgctgtgttttccccatcatagcaaggctgctgtccaaaaaaacggacagaaaaattctttcaaaagccatggaaccttttttgccctgcgcgcatctaaggggtgtacaaagaaaacggcgctgtgctccacccggagacacagcctgccaaaagaaaagcgcaaaaaaagagactgcgaaagcagtctcttttttatatgcttttcagcaggtcacatggccttgataatgtccacgatctccgcgccgatgcgcttctgggcctcgttggtggcagcgccgatgtggggcgtgcaggacaccatgggatggctgtacagcgccttgttggtggcgggctcgtcggcgtacacatccagaccggcggcgcgcaccttgccggactccagggcggccagcagggcggcctcgtccacgttggtgccgcgggaggtgttgatgaccaccacgccgtccttcatcttggcgatgttctcggcggagatcagagcgccaccgtccacagcgggggcgtgcacggatacgaagtcggacatggccagcagctcatccatctccacataggggatgcccagctgctcctcgatgccggggatgtggaagatgtcgaacgccacgaccttcatgccgatggccttggccatcacgcccaggtgctggccgatgcggccgaagcccacgatacccagggtcttgccctgcagctcaatgcccttgccgtaggccttcttctcccacttgtcctcacgcatggtgtggccggcgatggagatgtagcgggcgcaggagaacatatggcccatagccagctccgccacggactgggaggaggccttgggggtgttcttcacgtcgatgccgttggccttggcgtagtccacgtcgatgttgtccacgcccacgccgccgcggatgatcagcttcagctggctgcccttggcctcgtcgatgtggttggcgcggaccttggtcttggaacggaccaccaccacgtcgaaatcacgcagcgccttgcccagctgatcgggctcatagaactgctccacgacctcgtgacccatttcacgcagctccgccatcgcggtcttatccataccgtcagtaaccagaatacgcatggtaatactctccttttaaaatacgttttgttgtcggaatttgccattaaagggggagcttgctccccctttaacaggttttacttggtgtgctcggcctcaaacttcttcaggaactccaccagcgcctgggcgccctcgatgggcatggcgttgtacacgctggcgcgcaggccgcccacggacttgtggcccttcaggttgtcgtaaccggcggccttggtggcggccaccacctcggcgtccagctcggcgctttcggtgacgaaggggatattcatcaggctgcggaactccggctccacggtgcccttgaacatcttggactgatccaggaagtcatagatgaccttggccttggcgatgttgcgcttgtgcatctcctccaggccgccgatgctcttgagatacttgaacaccttgccgcagcagtagatcgcccagcagttgggggtgttgtacatggagccgttgtcggcatgggtcttgtagctcatgtagacgggcatcttggggtcgatgtcctcgcggatcagatcctcgcggatgatgaccaccaccatgccggcggggcccacgttcttctgcacgccggcgtagatcatgccgtagtcggacacgttgcagggcttgctcaggaacatggaggactggtcggacaccagcacatggcccttggtgttgggcagcttgttccaggtcacgccgtggatggtctcgttctcgcagatgtacacatagtcggtgtcctcggggatgtccagatcggagcagtcggggatatagctgtaattcttatccttggaggaggcggctacgatgacctcgccgtacttcttagcctcggcaatggccttcttggaccacgcgccggtctcgatgtacacggccttgccgttcttcatcaggttccacgccacagcggcgaactgcagggtagcgccgccctggatgaacagcaccttgtagttgtcggggatgttcatcagctcgcgcagatcggcctcggcctcgtcgatgatctgctggaacaccttggagcgatggctcatctccatgacgcacataccgctgccgcggtagttcatcatctcgtcgcggatctcctccagcacgggctccggcatcatggcgggaccggcggagaaattaaaagtacgaccgtatttcatgtggttttcctcctatttgtatattgttgggtcttccttgtgccttttgcgtttggtaatatatagtatacggcaacaccgcgccataatcaacagggaaaatgaaaaaaagtcagataaactgaaaatttttcagccctgctgaaagtttatccgacagggtttgacacactcccgcatagatggtagaataatcgtctgcaaagagaacgttacaggaggcggcacggccatggagaaggtaaaggagcgcatcacacactacagtctgtacgtcactgccctgctgaaatggctggcggtgggcgcactggtgggcggcgtgggcggcttcgtgggcgcgctgttccacctgggcgtcgactgtgccaccaacgtccgcctggcccactcttggattttgtacctgctgcccctgggcggcgtggtcatcgccctgctgtacaggctgtgccggctggagggcgcgggcaccaacgccgtcatcgagtccgtccacttcggcaaaaaaatacccacccttctggtgccgctgatcttcgtctccacagtcatcacccacctgtgcggcggcagcgccggccgcgagggcgcggcgctccagatcggcggcggcatcggctaccgcaccggcacgctgctgcgcctgggggagaaggacctgcccctggccaccctctgcggcatggcgggcgtgttctccgccctcttcggcacacccctgacggccaccatcttcgctctggaggtcatcagcgtgggtgtgctgtactacgccgggctgctgccctgcatcaccgcctctctgaccggctactacatcgctctcctcatgggcgtggagcccacccgcttcaccgtggccatgccggcgctggcctggcccaccctgggccttgtggcggtgctggctgtgggctgcgctctggtgagtatcctcttctgccgcggcctgcacatcaccgagcacctggccgcccgtgtcctgaaggatcccttcctccgtgccgccgcgggcggctgcgtgatcgtagccgccacgctgctgctgggtactacggactataacggcgcgggcatggatgtggtggcgcgcgccttgtccggccaggcggacccctgggcctggctgttgaagctggccttcaccgccgtcaccatcggctgcggcttcaagggcggcgaggtggtgccgtcgttcttcgtgggcgcgaccttcggctgcgtgttcggcggactgctgggcctgccgcccgcctttgccgccgccatcggcctggtgtccgtgttctgcggcgcggtgaactgccccatcgcctccgttatcctcagcatcgagctcttcggctccggcggtctggtctatttcgccgctgcctgcgccctcagctacctgctctccggctattgcgggctctacagcagccagaccatcctctactccaagctgaaggcggagtttatcaatgtgcatactcatgagtaaaatgcagcccccgggaacccgggggctgacattttataagcaaatcttaacgtttcgttcacatgattttccgaaaatcgtggtatcctgcgggtagtacaagaaaaagaggtatcgcccgtgaagcgcacgctgaccgaacaacagaaaaaaacgctgtccgtactggccatcgtcatattcgttctgctgtcggcggcgctggcctggttcgtggggcggcccatggtccgctttgcccgccagccggagcagtttcgcgcctgggtagacggccacggcgcctgggggccgctggcctacgcggccatggtgtttctgcaggtgctggtggccattatccccggcgagccgctggagatcgccgggggctacgccttcggcgcctgggcgggcacggccctgtgcctgctcggtgccgtgctgggcagcgtgaccgtctttgccctggtccgccgctggggccgcggtctggtggaggtgttcttcccggcggacaagctggaaaagctccattttctcctccatacctcccccaagcgcaccgccctgttctggctgatcttcaccgttcccggtacgcccaaggacctgctgtgctacttcgcgggcctgacggacctgccgtgggggacctggctgctgatcgccacagtgggccgcctgccctccatcgtcacctccaccgtgggcggcagcgccctgggggagcagaactaccgggcggcggtcattgccttcgctctcgccctggctgtggcgggtgtgggctatgtgatctaccgcgccgtctgccgtcggcacggacaaaaaccggataacacaaagaccgacggctgagccgtcggtcttgtatctttttcagcctcagaacgcgcccagtgccttgaacagcaccgaccaggcgaacatggtcacgatgcacagcgcgctggtggacaccacgatgtccccagccagctccgcgttgccgcccatctgctgtgtcatggtgaaggaggcgatggccgtggcactggcgaacacgctgatcagtcccgcgaagcccacgccccgtatgccgatcagaaacgccgccgtcagcagcagcgccggcatcaggaacagccgcaccacacacacctcgatcaggtccctccggtaccggcgcaggccgctgaaccggaagaaggcccccagcaggaacagcatgaacgggctggtcatggcggccacctggtgcaccgccgactccagcgccgtaggcagcctccagccggtgcccaggaacaccagccccacggcggaacccaggatcagcggattggtggccaccattttgatgagccttccggcgggcagtctctcgccccggaacgccgtcagggtgatgaccgccagcacgttgaacagcggtacgatgatggccgccagcatggccaccggtcccatgtccgctccgggcaccagcaccgtggccagcggcaggccgataatggccaggttgctgcggtacataccctgtatcttcacgccctgcttttcgtggtccttctccgtgggcagcacgatggccagggacaggccgtacatcaccagcgtggcccccacggcgaacagcagcagcttcggctgcaccgcctggtcgatggtggaggtgtacaggttccagaacagcattaccggcatgaagaaccggaacgccatcttgttcagtccgggcacgtcctccacccggataccgcccagacacttgaccccgtagcccagtcccataataagaaacaggggcatcacggcgttaaagcagacttgcagattgctgagcatgacccatcggcctcctttcccccgtgcagccccggcgcacggtctattgcgtcaaaaacgtcatggctgccagcagcacggccaaaaagccgaagctgacggcggagaacagtgccaggaaccgtccggtctgtcctttgacgtgcttcgtatactcccggaaggtgatcaggctggccagcgacgccaccagcgtccccgccccgccgatgttcacccccaccagcagcgccgggtaatcgtcggtaaactggctgagcagtatggccgcgggcacattgctgatgacctgactggtcagcgccgccaccggcatggccccgtgggccagcagctgccggaacagtgtccgcacaggctctatccgggccatattgcccgagaaggtgaaaaacgccgcgaacgtcaccagcagcccccagtccacgctcagcagcgcccggcggtccagcaccagcagcgccgccgtgatggcggccagccccagccaatacggtatgccgcgcagcaccatggccgcagccgtgcagaacagtacgccgtacacgatgcaccggcgcttgtccaccggcgtctcctgcgccggtaccgtcagtgtctcccggggaatcagcaggcagcacgccaggatcagcgccgtggacagcaggaacggcggcagcatgatggtcaggaactccccattggggatcgtataatgattaaataggtataggttctgcggattgccgaagggcgtcagcatcccgcccagattggcggcgcagttctgcaatatgaacgtcagcgccgtgtgcttcgtctgccctgtgccctccagcacgaaccagctcaggggcagaaacgtcagcagcgccgtgtcgttggtcagcagcatggagccgatcagcgtaacgacaaccagcgccgtcacggcgctgtgggccgtgtgaaacgcccgcaccagccgctgcgccagcagggggaacagtcccgcgccccgcagggcgcacaccaccgccagtatgcagaacaggcatgagagcgtcttcacgtcgtagtacccgagataggcgctgtccggcggcacgaatacggcggtgacggccgccgccagcaccgcgatcaccggcatggcgttggcgcggcaccactggagaactttcatgtatgtatgcacctccgcacgatacgactcaacggctgttaccttaccatattttggccggaaacgcaagggttcgccccggctttcttgcccttttccgctgcctgtgctatactgaaagcgatacagaaaagggaggtgctccatggatgacatcttgagccgtttttccatcaactgccacagcagcatccgctatgccggcgcgatgacggtgtggttcgaccccttccgcgtggcggacgcgccctgcgatgcggacgtggtattcgtcacccacgaccactatgaccacttctccccggaggatatccgccgggtgatgaagcccgacgcggtgctggtgctgccggagacgtgtgtggcggcggcgctgcaggccggctttgcctcggcgcagctgctgccggtgcggcccggagaggcgtacaccgtgcagggcctgcccttcaccgccgtgttcgcctataacctcggcaagcccttccacccccgcgggaaccgctgggtaggctatgtggtcacgctggagggccggcgggtctatgtggccggcgataccgacgatacccccgatgcacggtccgtgtcgtgtgacgtcgccttcctgccggtgggcggcacctacaccatgaccgccgcccaggccgccggtctggcggccgccctccgcccgcagatcgccgtccccacccactacggctgtatcgtgggggagaggacggacggcgcggcctttgccgccgccctgccggcggacatctccgccgtgcagctgatccgccaatgaccccgtacagaattccgccccggcgtcagccgatgccgaccagacggtggaggtgacggcccccggcaccagccggggaggatgatcgagcgaacgaaaaagacattcagcggcccccggcgtcagccgggggggatgatcggatgagcaaaaaagacacttagcggcccccggcgtcagccgggggccgtcacttcatttttgctgcattttgcttacaaaaaaagcacaaaaagggaaccaaagagtacagggcgggtacagaaaaagtaaagcaaatgtatcaaaagaaagcactatttctcgcttttttcctcccgcggcagcaccagattgagcagtacggccatcagtgtggccaccaccaccggggactttccgaagatggtcgtcaccgcctccgggaactgtgccagggcctctgccgcctgggaaatgcccacacccagtgcggcggaaagcccgacgatcgtggtgtttcgggcggtcagcccctcggcggcgatgagcttcatgccggtcatggcgatggtggaaaacaccgccgccgtggccccgcccagcacgcattgcgggatggtggtgagtacggcggaaaatttcggaatgataccggcaagcagtaaaaacgcgccggtcagcgcaaaaacgttgcgatttacaactttattcgtggctacaattcccacattctgggagtatgtcgccgtgggaagaccgcccagcagcgctgtcagaatgttgctgacgccataggctgcgatgccgccccgcagctcctgcgtggtgggctcccgatccatgccgcccacggtggtggccgtcaggtcgccgatagcctgaatggcgttgatggcgaacaacagccccagtgcgacgcacgccgagggttcgaatgtcacgccaaagggcagaaattccggcagagagaaccacccggcccccgcgatgccggacagatccaccatcccggccccaaaagcgacggcgtagcccgccagaatacccagtaaaatggacgccagcttaaaaatgcccctgccgcgattggtcagcaccagcaccaccgccagtgtaaacgccgcaatagcccagttctgccaggatccgtacaccagcgcttccggcaggccccgctgcaccacaacgctttcatatgtgttgccggtgccgccggccatatagttgatggccgtggggtacagagacagaccgatggtgaacactaccgtaccggtaatgaccggcgggaacagcctgcggataggcttgatgaagatgcccaccagtgctgccaccgcgccgcccacgatcatagcgcccgacacagcggccaacccgccgctgccggagacgatggcctgcatactgggcagataagcgaagctgacaccgaagaccaccggcagccccgcgccgaagcgcccaccgatgggaaacagttgcagcagcgtggtaacggcggacatgaccagcgatgcctgtatcagcaggacccgctggtcctgcgccagtccggccacgttggcaatgatgatggctggggtcacgcagcccacgatcatagccaccaggtgctgcagcgccatggatacggctatgccaacaggtggcaggccccggtattgaaacagcgcctcccggcggcattcaagctttcgcatggtgtggtctcctttgtgcgtagtgtgctcagtatagcacgtttttaacggaaaactcaaccgttttctcacaaacagcccaagcggcgcaaaaccaccctccggtgatgccggagggcggtcagatcatgcgtgtttatgcctgcggacactggcgaaaaacgggcgcttcagcgtgtctgtactgcaatatggaggagttgaagtctgcgctgacccagcgggccatcgagcagcatacccagcgggtacgggaatctctgcgggcgcatgaggggtgcgatagtcggtacagcagctacggcatgggctttgtgcagttcgcggcccaggaaaagcagctgttccgctggctatatctggaggacaaccagccgggccgccatcaggaggacgtgctggagccggagatcatccggaccgtcatggacgaattcggctatgacgaggtcacggcccaggcctttcaccgggatatgacgtattattcctacggactggccatcctcgccaacaccgggcatctggcgctgacagagacggagcttcgggaagcctttcgacgggagttccgtgcactggcggcgtattacggtccgccgaagaagctgccggaatttgcagagagggagaatgcagcgcatcaattattccgctaagaggccgtcttgcaaaattgtaagaaagttgcaggaaatgcaaggaaaagcaatggctgccatgggacaatggcggtatactcctccggtggaaagaaggtattgaagtgaaaacaaataagacattggcacagaagctgtgtctgctgggcctggtgagtctgctgtcgtatacggcggctctgctggcagcgctgtgttttttggtgctgctgcccgggtgcagcctgggggagaaggtggatcgcgagccggtgcagacactggaatgtacccgcccggcatccctgtccgggctgtatccggcgggcggcagcgtggtgctgatcagctgggcggactatgagagcggcaggaccactgtgcagctggtggatgcggaagcggacaccgtgaagcgtgaggtcacgctggatggggtttgggatacgaagcggcaggccctggcgcatggatttgcgctgtgcgaccgggagacgaatcgttggaagctcctggacgatgcgctgacggagacaggcagctttgatgcggagaacgtggatggctttttctcatatgacggggagagctattacttcctgcgggacggggtgctgcattgtcagaacgtagccggaggagaggcacagccggtaacggcgctgtcacagctgcggttcgcggaattgacggcctatgatgcggcaagcgggcggatggcggccctgttccgcctgtcaccctacggcagcgtctgcggtacggcggtctttgacccggagacgggggcgatcagcctgctgcaggagcagcggtatcaggtgatgttggcgccgacgggcggcatgagcctgctggcctttgacaacgataaaatgggatattccgccctgtgcggcagcggcgatacgttctggttcgccgatgcttcgctgtttctggacgcgggaggcgcgctgtacgccgtcggcgatgcggaggagctgatcggtgtgggaacgggccgcacgacgctgtataacgtgggggagagcatcacggcctgcgacctgacggctaacggtattgccggagagatgtacgactgctgcgttttgccggaggcaggcctgctggtgggcggcatgtatgaaaacggcgccttccggctgtacgttacagacccggcgcagctgaccttcgagccggtagcgtcagcggtgcccgtcccgtcgccgctgacggtgaatgagacactgctgcaggcctattggggtgccctgaacggcctgccggtggcagagagcttacaggaggcgcggcagcaggcggatgtgttggagcagcgatacggcgtgcggatactgctgtcatcccagtgcagagaggcggcagaactgagcagctatcccatcactctgtcggacaccatggacacggaagcagagctgaacggcgtccgcgccgtgctggcggcgatggaccgcagctttgccctgtatccggagggctttctggcgcagttccgcaaccgcgccggtgagggcgggctgtgcttcctgctggtggctcacatcgacagcgactatggcgtggtaggctgcacctacgattcggcggactggcagtatatcgcactggacgtgcaggccgactatatgcgggagggcactgtctgccacgagatctggcacgctacggagaacgagatactctcacgcgattacaccgccttcaactgggatgactggaatgcgctgaacccggcgggctttacctattggaacgacagcggtgactatgaccggtacgacgcccgctggaccatgttcgacaacggcgagggcgtgtactttgtggacagctacgccaagctggcggcacaggaggaccgggcgcggatcatggagtatttcatggtacatgaggacgaggcggggctgctgatccagtcagacgccatacggcagaagctggaatggatgtgccgcgctgtgcgggagtgcttcgataccgccggatggggaacgccccgctgggagaagcttttgtaaagcaaaaggagcaacaatgataccggaatggaaaatttacccccgttctcagggacacagcaccgtgtacctacagaacgtggtcacagatcctgccatacaggtgggggcgtacaccatctatgacgattttgtcaacgacccccgggacttccagcggaacaacgtgctgtaccactatcccgagtgcaaccatgaccggctgatcatcggaaagtacagctccatcgtctgcggggcgaagtttatcttcaacgcggccaaccatacgctgaacagcctgtctacttacccgttccccatcatgttcgaggagtgggacctggggacggcgtgcgaggacattgccgccgcctgggataaccacggggatatcgtggtgggcaatgacgtatggatcggctatgaggccgtgatcctggcgggcgttaccatcggcgacggcgccatcatcggcagccgcgccgtggtgacaaaggatgtgccgccctacaccatcgtgggcggcctgccggccaagcccatccgcaggcggtatgacgaggagactgtcgcgcggctggagaagctgcggtggtgggactggccggaggcgcaggtacggcgggctatcccgctgctgcaggccggcgatctggacgccctggaaaagttggtataaggccggcggccgtggaccaggcgtacacgccggccactttctgaccctgctgcaaaagagtatctgagggatacgtgtatacggacaacgaaatgagccctccggcagctgccggagggctttcaactgcctgttgcgaaacgggccggggaaaggtataatctaaggagaacatactgcggaacggcgagaaaggagaaacctatgggtaatgtgacagcggaccgcgcatgggatgtccatccggtgacggaggcggacatagaggcgtatctggacatctatctcaattcctatccggcgtacaagacgctggacgaggaatgccgggcgcactaccggagcaagcatcttacggagctgcgggaggacacccagacttggacgatgggcctgtttgagggcggcacactgatcgccaccatgaagctgatcctgttctccatgaacttctttggggtcatgcagcctgcctgcggtgtgatggcgctggaggtacaccccctgcacaagaagaagggcgcggcgctgtatatgatacggtatgccgagcgctatgcacgggaaaacggcgcgctgctgaccatgctgctgccgttcaacatcggcttttaccgtcggatgggctacggctttggcgggaagttatatgaataccatctgccaaccggggcactgccgcggttggacggagaggtgcgggcgcacctgcgcctgctgcagccggaggagtttgaccaggcgatggactgccagcggcgctttgctgcccgaaaccatggcatggtggagaagttcgacgaggagctgcgcggagcccggggggatattcaggtgcgccgtatgggttattacgacggcggacgcctgttaggctacgcggcctatcggtttgaaagcgccagtgcgtgcaactatacccaaaaccggctcagcgtggaggaactggtgtatgagaacggcacggtgctgcgggcgctgctgggtggcctgcagatgcaggaggatctggcccagacagtgatactgcggacaggggaggaggatttccaccatctgctgggcgatccgcaggacgtgtccggaaactacatcgactacggctttttgcagaccaatgtttccgccgtggggaccatgttcaagctgacggacggggcggacttcgtgcggcggaccggctatcggaatttcccggcggggacgctgacggcggccttccgctatcgggatgagatggcggaccgggaggaggagctgcgtatcggcttttccgatggccgctgggccgtggcagaggggaccgcggacgtgacagtgatctgccggcagggggatctggcggcgctgctgatggggtcctgcggtctggcggcgctgctgcggctgggtgcggcgtccgcagatgacgccgaaaaggcgcggcagttggcgcagctgctgtactgtgtccagaagccctggctgaacgcggattattgagctgccgcggttgacaaatagaaaacaacgcaggagaacaagagatgcggaacatattgaaggaaaagctggccagaggcgagaagccgctgggcacattcgtgggtaccggcagtgctgccgtggtggaatgtctgggctgtgcggggctggattttgtcattctggacaatgagcacagccccattgaggcggagaccaccgcccggctggtgtgcgccgcggaaaggcggaacatcacgcccctggcccgggtgcgggagatcagccgcccggcgatcttgaagctgctggacgttggcgtgcaggggatcattgttccggatgtgcacggcgcggcggaggtgaagcgtgtggtggactatgccaagtacgccccggtggggcagagggggttctgcccgtcccggaaggatggttggggcaccgatacgccggccggcgtactggagacaatggcgcacttcaacggtgagacgctggtgatcccccagtgtgagacgatagaggcgctggcgggtattgagaatatcgcagcgatggagggtgtggacggcatctttatcggtcctttcgatctgtctatttctatggggctgcctggggcctttgaggagcagcgcttcaaggcggccctgacgcggatacaacaggcctgccgccaggcgggcaaaccctgcctgatatttgccggggacggtgcggccgccggtgcacggctggcccagggcttcgacggcgtggccatcggactggatgccacgatgctgatcgccggtgtacgggcgcagctggccgcctgccgcggataaagaagaaaagaggacggcgccccacggggcgccgtcctctgcatattacatatccttcattttttccagcagctctaccatcttgtcgtagaagtaccgacattcgcggatgctcaggtactcctgagtggagtggcagttgaaggcgttgggcgtcagggagacggcgttaaggcacggaaggtgatggcccgtctgccgatatagccgcgcaggtcggctaccatgtcgtttttcccgcaggtgcgcagcgcgtccgggccaagtgccgcgatcgccgcggccagatagtcctgggtgtcctcatcatggaaggagacgcaggggtgtcgatgcgggcagcggcgctgggcgatcatgtagtccagctgttttttcatttcttcagtaaggtctcgatattcatagtatatctcaccgcgattatatgcggcggatgtatattcctccgacaccggacaaagactacggatgtaaaatctgctttgactggaggaatttcatatatgaaagcaacaggcatcgtgcgccgcatcgacgacctgggccgcgtggtcatccctaaggagattcgccgcaccatgcgtatccgcgagggcgacccgttggagatatacaccacccgtgacggcgaggtcattttcaagaagtattcccttatcggcgggttggaggagttcgccgcacagttctgcgataccctcagccgcagcacggacttttccgccgctgttaccgaccgcgatgcggtcatcgccatcgccggggcggggaagaaggaactgctgggcaagcctgtctcccctgcgctggagcaggtcatggaccagcgtggcctctactgcggcgagggtgtggccatcagcgatgagaacgagcagttccgggccgctgtggcggcacctattctctgcggcggcgacgtgctgggcgcggtgctctttctctctcccgacggcaagccggcgggggagacggagtgcaagcttgcccagaccgtggcgtcctttctgggcaaacacatggagtcctgacaaaaagccccgcggctttcgccgtggagccttgcataacggctttcgcaagctttttgaccggcctgaaaaagagaagcgcccttcaggcgcttctcttttgatttatcagcgcagcagcaggctgacaaccattcgtacgtctccgacgttaactccgcagtcaccgttgacatcgcagcggaggaacttctccatgtcaagtgcggaatgcttggcgttatagaggtcatagacatactgggcgtcgttgatatcggtatgtcccgtgccgttgacgtcgccgctgtaggataccgacacagtggagttgcccttaacggagatcgtggatttcgccgcggcggcgatatctgccgccgtacccttgccgaccaacagccaggcgtaggcttcgtatttctctgaccagaacatggccgtatcaccgtagtagagggacttggtcgcagggagctttgttttcggcgcggcggtgatgagccacacaacgctgccgtctgtatacttcacatactcggccgcgtccaccgtcaatgcaagctgcgccgttttggtgatggtcaccataataatgccgcccgtgatgcagtccccgggaatggtgtaagtgctggtgctttctgcattgcgctggagcgtgatgtttttttcaccggccatgacggtgaccgtgtagtcaaatccctcttggtgattgataccgaatgtaaaagcttcaccgctttttacggtataggacgtaacgccatcccagacatcggcggcgccgctgcccgcaagcacgatttgcgtggtgccgctttgcggggccttcttcaccgtaatgaccaccgggccggtgacggactttgccgggatcgtgtaggtatagacgctgctgccgctgctgttgacagtgcacgtcaccggcaggccgtttaccgttacggccaccgcatagtcgtagttggccgcctgcgtgaccgtgaaggtgtactcctgcccatgcgttgcggaagtgggggcgctgacgtcgccggagccgtcgcccttgacggtcgccgcgtatgttttgacagtgggtgtgctgttggcgctgatggccagctcgccggtgacattttcgatcgtgtagctgccgtcgccgttgttgatgatggctaccgttttaccatccacagtggccgaaaagtcgtagtcatagccgggatcggcggtgaaggtgtagtcgccgtttgctgtcacataagcggcgccggaggcacattttggaagctcaacagggaagccgccacacaggatcgtcaccgtgttgctttggccggccggtacactggcagtttgggcgtcctttgccgcgttggcgcggacgtccatctgtgccttgaccaatttcacagtggcttcaccggcggcctttacggtgaaattcagcgtgataaagcggtcggagcgcggttctccgtagccgcctatggtcaaacgaccaggaacagagtgatcaatgacatcaggatctttgctgccgatggttgcgcttgcgaatatgagtttttccgcatcatagtcgatttggaagaaataggtgttgtactcccgcgatgtggagttttggcccaaaaacaacgccactgatgctgtttctccgaccgcagcgggtgggttgctgtacaagtaggcgtaaaagctctctgtgccgctggcggacgccggcagcaaaagcagtaccataaccgccgctaaaagcccggaaaaccatcgtttcatcttaaaaacccctccgtttcaccacttttcggtaaataccaacctaaatttatcaccggtcaccgaacaattcaattcgcaataggcagaaatttaagggggattgttgtgcagaatgacgataaagcccatgaaaatgggcaaaaaccttcccccagggggagggctttttcgcgtccctgttagcgttccgttaaaactgcgttaagaaatcaccgattttcttgaaactacaatcatagagtgctaccataaaacaacgtagggggcgcgaggtacagtcctcgcgcgacaggaggggagctcccgggagacagatcatctgtttcccgggagccttgctttgcctacaaaaacccatcggccgcatttttgtgcggccgatgggtttaccataatttgtattattgtcaacttagccctgcggctgctcactttctggcaccggagtctcgacggcggaaacggcagcgggctccggaaccgcctcgggtagcggctcctgcggggaagcctctggcacagcagggacttgcggggccggttctacctgcgcggcttcagcggcctcctgggcctcacgggccaggcgctcgttttcctcgcggatggcggccttctgctcgcggcgggcatcagcggcagcgaagaacgcccgcaccagagccagcagcacgaagaacgccgcgatggccaggccgatccagcccgcagtgcggatcaggaaaaagtcccggatggtgaaatactccttgtagatccccaggaaatacagcgccacgccgccggcggcacacagaatgcacagcagcaggcggaagaacgcccggaccttgtgcttgcgcccggccagatacgccaccagcagcgccagcgcggccagaaacagcgccggggactggcagcagaggatatagcccaatgtcttgtccaacatggcctcgtctccttacagctggcacttgccccggggcaggtatttgccgtccggcccggccagcaccttgccggaggacaccgcgggcttgccgcggagccacacctggcggatggagcccttggtgaccacgccctcataggggttgtagcccgccgcgcccaccatatcctcggcgcggatgacgtggtcggcgttggggtcgtacaccacgatgtcggcgtcggagccgggggccagtacgcctttgcgcgggaacaggccatacagcttggcggggttctctgccagcacacggcacatggcgcccagaccgatcttcttcttggccacgccgaaggtgtagatcagctcgccgcgggtctccacgccggggatgccgccgggaatagcggtgaaatcgtcgcggcccgccagcttctgctgggtagtgaagctgcaatggtcggtggacacggtctgcacctcaccccggcggatggcccgccacagggcctcacggtcagccggtttccgaataggaggcgagcagacgtattcggctgcctgcagccagtcctcgttataatacacgctgtcatccaataccagatactgggggcacgtctccacaaagaccttctggccccgccagcgggcgttggcgatctcgtccagcgcctcgatgttggtggtgtggacgatgaccacggggacgtctacctgttcggcgatgcggagcagacggcccacggcctcggcctccatgatgtcgggccgggtctccgggtggcagtggacaccgttttcgccggcggccttcttttcggcgatcagcgcgtcgatgacgccggcgttctcgcagtggacgccgcagatgccacccttctccttcagttttttcagcgccttgtacatggcctcgtcaccgatcatcatggccgggtaggtcatgtacatcttgaaagaggagataccctcggcgtacatatcgtcgatctcgcgctcgatggtctcgttccagtcgtcgatggtcatgtggaagccgtagtcgcaggcacacttaccgtcggccttcttgtgccacaggcgcaggccgtcgtgcagcgtctcgcccttgttggggcaggcaaagtcgatgatggtggtggtgccgccccgcagcgccgcccgggagccgctggcgaagtcgtccgccgtggtggtgttgcacacgtccagatcgaagtgggtgtgggcatcgatgaaaccgggaaacagcagcatcccggtcacgtccaccacctgcgcgccgatggcgggaatgtcgcggcagacatcgaggatcttctcgccctccaccagaacatcggcccggcgggggcccttgccggtgaccacggtaccgcccttgaacagcaatctcatcacaagacctcctcgtttgtgttgatttctgtcggtattataccacttttcgccccactgtgtaaagcacaataaaaacgtccccaagccttccccttgggggcgctccctcgttagccttcccctcgagggggccgcggtgttgaatgacacgccggtggcgtgtcagacccgtggaccgaccgacccgcagggagacaggtggcgcggggcagtccctcaagccttccccttgagggcaccccagtgcgcacactggggtgtgcacagctgaaggtgtcagcgaagctgacggatgaggggtaaaaagaagctcttataaccctcccgcggcagcgggaggtatatatatttatcccccgcggcagcgggggatatttattttgtccgcgccgacaggcgcgggctgattaagcgtaaaaaagaaagaccccacggtcaaacgatctttattcaccccacccccgccagggggtgagataattaaagtcaaaaaagaaaggccccgtaggaaagcagcatttactttccctcccgcggcagcgggagggttatatatttatctcaccccgtcaggggtgagatattatctatccctggccgacaggccagggataaataagtacaaaaaaagaaaggcccaatgggcctttctcttttttgagtttaattagaactcctttttcttgccgatgacgacggcggagccggcgacggaggtcagagccataccgacgtacatagcgataccagcgtcaaaggtcttgggggagggcttggtggtgtcggtggaaggagtggtggaagtggtccaataccagttaccggtcaggttggtggtatcagcaccagcgggaatagaagcatagttgggagcctcaacagcaacagccttgcacttggagcaggtgtaaccagtaaccttgccatccttaacggtaggaacggcagtgtgctgaaccttcgcggcatcaagagtacgcacggtaacgaccttgccatcaaccaccagagtaccagtagcagtagtgctgctgtcagcaacagccagatgggtgttgccagcaacctcataggtgtaataggtcttagtggcatcgtagttggcgggcttctcatacttgccgcaagcgtcagcgaaatcgttgtaaaccttaccgatcacatagtcagcagtgggaatcttagccaggtacagaaccacgttcttggcatcggcctctttgtacagaacatgggtagcctcggccagagtgctgactacgatatacttgtcgttaccaacctcatagtgagcgtaaacaccaacagtggtcttaccatcggtagtcttgggatccttgccgggaacataggtcagggtgctttccgccgcaatgggattagtagacttatcatcggtgcccttcaggtagcccttaacaggctccgccgcgaaagcggtggtgcacagtgccagagccatgaccatggccagcacagttgcaatgatcttcttcatgtttgtttcctccataaaaatttgtttgtggccagcgtcgcgtccttgctccaaccaaccgtttacaacgtaaacatcattatgttgtaaaaatttttacggattttattaccagttatttccatttttgagacagcgccggcgcgccgtcaaaaatcgcccgaaattggaaataatttccatttcttccataatttaccagtaatttacgcaatttatctgatcgcctgtaaagcgtaattcttgtgtaatgcagcatttatgcaattcaaatcgagattttcaaaaaacgcaacaacttagctggaaaaattttccagtcaaaatcgaaaagccattatgtaaactatatagcccgaaatacatccaaaatcccgttcataattcggttacaatttattcggcgaaagcgttgcctgtgtttttgtgcgtaaaaggagcttcgccgccccggcggcgtggaggcttacgcggccgcttgccccagccacggtaggggcgttttcttctcccgggcgggcgattatcaaatcgcgccaaagccgcctggagggcggctttgggtggtggcggttccgccgccggtgaaagcttttatccatggagtttcgtggtaatttttggaaaaatgtttggaaatagatggaaaacaattcctgcgccggaaaaattatttaaaaaaaagcagaatttcctcttgaaaaaacgagcgtgttgtgctatttttatctgtggtaaagccatttactgagggggatgcgaagcgtggggtgcgctttgcacgacagggagggctcccgggaggcggatatctccgcgtcccgggagtttttttattaaattaaatagtcaaagccgccctgatgggcggctttagtttacgataacaaaattatggtcaactgttcggcgcatcatcgccgcgataactatccagtgcctgccggcagtgttcggtgaaatcacggcgcacagggtcgggcgcaagaagctcggcctgaccgccgaactggaacagccagccgtaaaatgtaggacctacctccaccggggcggtaactgcgatacggtctccatctgggcggatatgcgcatcagcgccgaagcggtccatgactacattgatgagggcccggtcaaagcgcagctgcaccgtttcggtgcggccattgtacatatcgaaaatcgttttgacgtatttacccaggtcgaactgctccggcagcggatcgcggggtatatcggtaacggtcagggactccatacggtccacacggtagtggcgatagtcctgaatggccgggtcgtaagccaccagatagtaatgcttatccacgcagagggccaccgggttcgtctcatagggcgcgccgccgcggcggtaggccttgccgccatcaggtgtccagtcgaagtagcgaaacgtgaccttgcggtcatcgttgatggcggtattcagaccgtcgatggcgtaatagagcttctcattgtgggtgcggacccggtccatgacgtagacctgacggcgcagctggcgggcattggggcggctggtgagctgctccagcttggcgataagctccatgctcttgctctgtgtgagaaagggcgacgcctgtaccacatcaatgagcagcttcagctccggcagctggaactcccgttcgccaagaaaatagccgtaggtcttgccccggacagcctgcacatccatgccgtacagctccagcagctccaggtcgtcatagatgcttttgcgctcggcggaaataccctggcgttccaaataagcgatcatatcctgaacggtcctggggtggcgctcgtctgtttcctcccgcagataccgcgccagatacagcagcttcagctttttattggccatggcgcaccctcccttcatttgtcccattgtaccagatacgggcaggaaagaaaaccactttttaccggcgttcgactttacatacacgtacttttaggctataataaagtgctatgctatcgacgaaaggaagtgcggcgttgcaagtgaaccaaatacgggcaggcgccgcgctgagctatgtgtccatggcgctgagcaccgttatctcgctggtctacacgcccatcatgctccgacagctgggcgacagcgagttcggcgtgtaccaggcggtgctgccgatcatctcctatctgaatttactgagcttcggcctgggcagcgcctatgtgcggtattactcccgcttccgtgccgccggcgacaagaagggctgcgccaagctgaacggtatgttcctgataacgtacctcattctgggcgcgctggtgctggccatcggcttcgggctgtcctactgcgatgtggtgttcggcaagaagctgacagcggaggagatcgaccttgcccagcggctgctgcgtatcatgtcggtcaatgctgcgctgacgttccccatcagcgtgttcgagagccatgtgaccatcaacgagaggtatctgttccagaagatcgtagccatgggcaagcaggtgctgaaccccctcattatgatccccctgctgctgataggctaccggtccgtgacgctgaccatcgtctcgctgatcttcacggtgctcagcggcgtgatcaatatcacctactgcctgacacggctgaaaatgccctttgccttccggcactacgacttcgcgctgctgcgtgagatgttcggctttacgctgtatgtgttcatcggcattgtggtggacaacatcaactggtccatcgaccggcagctgctgacgtggttccacggctccgccgcggtgacggtctacgtcatcgcctcgcagctgaacaactatttcctgctgttcggaaacgccatctccaacgtgatgacgccccgcgtccaccgtctggtggcggagaacgcccccatgcggacgctggacgccctgttcaccaaggtgggacggctgcagttcatcctgctgggcggcatattcctgggcttcgtggctatcggccagtccttcgtggtgctgtggggcggcggcgagcagttccgcatcgactattggaccgcgctgctgctgttcttcgcctgcctgtggaccaacatacagaccgtgggcatcgagatacagcgtgccaagaatatgcacaaataccgttcgctggtctatctgggcgtactggtgggcaacatcgtgatctccatccccctgtgtatgaaatggcagggcctgggcgcggccatcggcacggcggtcgccacgctggtgggcaacgtgttcctgatgaaccgctactactataaacacatcggcctgaacattcccggcttctggcggcatatcagccatctgctgccggccatggtgctgcccaccaccgtggcggtgctgctggcggtgttcgtccatcccgccacctactggcagctgatcccgccgggactgctgtttgtggcggtgtacgccgccagtatgtggctgttcggcatgaaccgctatgagcgcggtctggtgaccggaccgctgcggcggatactgcatcggcaatgatctgtctttccgcccctgcgcggcgggaagaaaaaagggaggtactctgttatgggaagaaaacttgcgaccttttttcgccagctgaagcatctcagcttcgcgcggatgaagctgcacatcaacgccgtccatgaggagacaggcaaaaaccgcctggccattttctgcgacatggtatggtgcgaggtgcgctacggcatcggctatctggactaccacgtgttcggctttgcgaaccgccgcggcgcggtgcggaagacctatatgaccgccgtgcagaaccaggccctgacccggcagatgaacgatccggcgtatttctatcaactcaacgacaagatcgagttcgacaccatcttctccgacctgctgaagcgccgcttcctggacctgcgtaagacggacgccgcgggcctgcgggacttctgcgccggcacggaggccatcttctgcaagcccgccgggctgtgcggcggcgagggcatccagcgtcttatcacagcggacatcgacgattacgacgctctgtatgaccggctggtcaagggcggccagctgctgatcgaggagcccatccgccagcacccggacatgaataagctgtgccccgactcggtgaacaccgtccgtatcgtcacgctggtgacagcgcagggcgcgcagatggtctatgccctggtccgtatgggcatgggcggcgtgtgcgtggacaacgtctcctccggcggtatgtacgccccggtgaacgagcatggccagctgtaccgccccgccttctgcgacaagaccggcaaatattacgagcgccaccccgtcaccggtacagagatcatgggcttccagatccccctgttcgaccaggcgctggagctgtgccgcaccgcgtccaggcgggtggaggcgcacctgaaatatatcggctgggacgtggccatcacgccggacggccccgtgctggtggagggcaacaacctgcccggttacgatatgtgccagaacgccggccatgtggacgagggtatgctgccccggttcgagaagctgctgggccgccccattatgtgatgaaaccgtatgctgcgccccgcggggcgaaacagagataaggaggacagaccatgcatcctatgcgcagaaaagacaaggaacgtgacgccgcctttgcctggcaggtgctgcgtgacgccacctatgccaccctggccatgaccgacagtgacggcgccccctattgtgtgcccgtgaaccatgtggccgacgagcagggcaatgcggtgtattttcattgcgccggcgccggccgcaagtgggacatcctgacgaaggagccacctgtatgcctgtccgccgtgtccaaggcagagctgatccccggcgagctgaccactgcctacaagtccgccctcgtgcagggcagggccgtactggtgcaggacccggaggaaaagatgtacgccctgaagctgctggtgcaggcgctggacccggtttccatgtcccgggccgttctctgcgccgagcactccatgcagcgcaccatgctggtaaagatcattccggagcacattaccggcaaagaatcccaaggcgattgatgaaaaaggcagcaccgcaaggtgctgccttttgttgccaacccgcagagcgcggaatcccccttatctgtcattgcgaggagcgaagcgacgcggcaatccgccccctcgttccctccccgaggggggatatttccaaagaaggggggacgcgcacgtccgccccttctttggccgcttcaaggggatgggtttcttaagggaagggggaaatcggaatcccccttcccttaagccgtttctttggtcactttctttcggcaaagaaagtgacagagaaaaccgcgccccacagggcgcaaaatccctggccgacaggccaggaataattaaaggcaaaaaaagaaaggcccagcgggcctttctcttttttgagtttaattagaactcctttttcttgccgatgacgacggcggagccggcgacggaggtcagagccataccgacgtacatagcgataccagcgtcaaaggtcttgggggagggcttgttggtctcagtggtggggtcagcggtcttgtcagcaacaacccacacaccagcgacctgctcagcggtagcgccggagggaacctcggtgtaattctcatagaccttagcggtggcgccgcaagcggagcacttagcggtcagcttctcgttatcgataacccaagtgtgaggaacgactttatcggacagcttaccaacctcagtcagaacgaggacttcgccgccaaccagcagcttgctgttgccaccagtaacatcggagaacagaatcacatcgtcgttatcattggtagcggtatagaacttggtcttcttgtcggcaccagcgatatccttgtagttgacctgaccgcacttgctacccagattagtatatgcagccgcctcgccatcggtatacttgacttctttaacttctttgaggtacatggcaacagtagtcttgccagtatacttcagaaccaagctagcatcggaagccttagtgaccttgacgtaatattcgtccttgaattggtcgccactcagcgcatagtaagcaatggtgttttcatcagcgtcagccttgtggtaggttacggtgacttcctcggcgagagcgacatcgctatccttaccgaagacatcataggtctgagacgccgcgaaagcggtggtgcacagtgccagagccatgaccatggccagcacagttgcaatgatcttcttcatgtttgtttcctccataaaaatttgtttgtgtccggttcggcttcatcactcggaccaccgtttacaacgtaaacatcattatgttgtaaaaatttttacggattttattaccagttatttccatttttgaggtagtgacaccgcgccgttaaaaatcgcccgaaattggaaataatttccatttcttccataatttaccaggaatttacgcaatttatctgagcgcctgtaaagcgtaattcttgtgtaacgcagcatttatgcaattcaaatcgagattttcaaaaaacgcaacaacttcgctggaaaaattttccagtcaaaatcgaaaagtcattatgtaaactgctttgacgctgatagcggccaaaagccgttcataattcggttacaatttattcggtgaaagcgttgtctgtgtttttgtgcgtaaaaggaagtttcgccgtcccggcggcgcggaggcttacgcggccacttgccccagccacggtaggggcgttttcttctctcgggcgggcgattatcaaatcgcgccaaagccgcccggagggcggctttgggtggtgcgcccccgggcgcgggggtacatctgtgaatgttccgttaagatgccgttaagaaatcgccaattttcttgaaaaccagatttcagagtgctaccatgaaacaacgtagggggcgcgaggtacaggccccgcgcgacaggaggggagctcccgggcgacagatatcatctgttgcccgggagccttgcttttcccaactcccttttaagttaattgttgctactgcttggttagcctattctaatgtagatttattcattaggggacataaaaagaggcaggagccgtaacggttcctgcctctttttatacaagttagtcagcagtccatcttgattcaaagtcctgcttttccaatttacaacagctttggacttttgcgccgagatttgtttcatcatcttccatggcatctaaacgcacacgaagagcctctgtcaaagacacaatagatgcttttgactttatccagttttgaggactaaatactcgattttccgcgacagccttgctgttcgcatttttgaaagctcgattcaatgttttaccagcaatgtttataattgtgtccatcatgccacattcctttaattgtgctagtactttactagggcgaggaaccatttcactcatattgctaacctcagcaaatactatagatacagcatacaaatggtgaaatggggcataagacttcatcgcaagtaaggtttcatcaagacccattggattatcaggattccacctactcataatggcactgtgtaattcatgtagtgcctgtacatcttctgctggatagtccttcttaaacagttgattaaagtaaatgtcaaatatctttgtttcgctataagacaaggttggacgctgtgagtgccatgcaatcagttctttccccaagtccgtaagctgtatgatgtgcccagcatcataccttgttgtatcaacattttctccacgcttagtaaccatgtaaccgtttgggtaagtctgctcatagtttttctttatgctcagtacaatcttatcattgcttcgtaaatctctagcttttacagcactttgagagttcgtggagttagtgattttgtcagctttttcactgtttgccatctcatagaacttaaacaggatatatccgtatgactttttagctgcctctccacaactaaaaattgtgctaaggctctggcatccatttacaatgttcaggtcttttacagttaactgcccattctgaatgtccatcttcgaacaaagcgctgttatgccattgtgacaaaagaaaaaatctccaggttctttcttgattgtcttagctatacccttgttgactttgttgctatttccaagagattgtcgaacattttttctgaaaagccttccgtctttaatacctggaatgtttacgcaatccttaagaggtatagctgccaatacagcgcgagtgccatttaactctacatcaaggtatttcccagattcaagttgaaaagtgaaattgatgtagttattggttttgttaagtgcctcgtcatatttgacctttagcatttcatcgtcaactacaacgaagttggcgttcagttcttcgctgtctgataacttcttgctaaatgcatccgcatccatctgagcctgatcagtcaactttgcagtcgttaccagttcaaaacaaatctcatagtcatcgtctaatgctgcagaaatttcattgattttgacctttaatttagaatttgcggcatcctgcaactgatttaagtcctgaaccaaaatccacgaagacaacacttccctaacaggttcggcatctatatactcaccagacataaactttccctgaatgatatagatggtagaatcttgattattgatataaacagcgtctatctgcttgtcattggcgccatctgtaatgcagtcctttgcctctacagtatttaacccatggatgttccgtaaataccatgctacaaaacgctggccatcgtttgcgtaattgtcttgataataggtttgctgtatatcatgtaatatcttggcatacataagtttttacctccaaatttattctacattgcaaaaagtatataatatttaggtatgcaattcaatagataatagtggcttattctcaagccactattattgctttgttaaaccttgtttgggaacaatcctttggtgttgagtgtcaattctcgattggtgatgcttgcgtagtcggctccggtaacatttgtcttgtcggccattatgtcatatagcttgtctaccttttcttgcgtgctgagtgtgccgttggcctctaaccaccagaacaactttaattgcagtccaagatatttcgtggccggtgctcgctcttcttgttctggatagaatgcggatagctttgaatgtattgcgttgatgcgtccaagattgtaggctcccttagaatgtttgccagattctatttgctccagctgtatgtgctctgttctggcaaatccctgatatgcactatggctatcagtaacaagaatagcatcgcttgcaaactttccagaaagattctttgtcaaatcatttgtctctaatcttcctacacatactgggtctattgtaaaatgtccacttctatctttacaagtcaacacacaggtctggtcattgctgataccctttttgtagctgttacctgattcaagcagtcgctccaatcgctctggttcactttttaatctgtcccaaaggccatttttctttagatactcgactttttcttcgtatgttctgtgatgacgaggcatacggtcaagtacatctatgaaaaatgcagggtctcgtttgcccttaaaagaaaccggaatgtaaaactcgtcacattcagcaatatctatgaactcactttgctctttataaatttcttcgagtgccaaacataccttgtggcgattatgccataccgttggtacactcgtaccaatagtatcggctattgcttgtaatggtagattttgcaccattcccaacaataaacctttccattgtgctggcgccagtcttgaatgatacatcaatgtctgactggtttcacagaaagttttacaacaatccttgcaacggtatctctgtctgcctcctgcttttccgtgtctcttcagactgatgctcccacaatgtggacacgccagaggtatttcatcattctcttttatgctgtcctttgtggtttgtcctcctgccctcttaacttccagtgcagccattaactggttgacttgttcatcgctgagtttatcaatgtcagtcagtatctccttgaagaaatcggccatagtaagccctcctagcagtatccgcctgtctgcactgctttcggtgcttgcccttcaaccgtagtccaagttctttagaagtgcttgcttctggagtgatagcgccttttggctgcattgtgctgctttctgctgatagtaggcagactcacggataaattcttctgccgcatcaaatgcacttaggagttccagcttcaactgctctttgttggatggcgcttttaagtctgttttctgtattgctgaggacaccatctttaggtaaccactgtcggatgtgataaacgccagcagtatccccattaaaccgccatgcacatttggattggctatctttttactgtctataacttgcttgatttctgtccactcagcatcagcgatgatttctaccccaagtttctttgcaaatattctagtctctgctgttacccgattgttagtgatgacaacaggtgccgcaccgttattgtagtaatgggttccagcataaacctcttgtataggtgccttgcttaaaggtttgttgaagaacttgcattgaatgttgaatgaatacttgattggccttgtgatactggtggctatgatgtcaatgccaccgtcattactgcctgttttctttgcacgaaacccatgctcaccaagaaactgaaccatgaggttctcaaaatctgttcctgtataacagttctgaaagaggaatgaggtatccatgcctatatgctcctttgaaaagtagtaactccatttgtgaagttcacttctcaatagcagagaggatggtgtgcaattaggtatccctaaattggactgatgtcgctatcttttgcaatgtatccatgcgggattgaatgattgttgagtggtcattgaatgtatgttgctggtttgactgtatatcaaagtagtggcaatgtatctgcacctcccaatcctttgatttgaaatatatatttcttcttaccacaaagacaaacgaaaagaggataccctgtttcaaaaggtatcctcgcgcagatgcaactatttattcacgtatttcaaagtttattcacgattatacatagcaacacttatcttgaaaagggactttcccaaaggaaaaacccaacagcctcgctaaaagcgcggctgttgggtttaccataatatatattattgttaacttatcgccaggtctgactgtaaaagtacagggccagcattccgggtcccacatgggcgccggtgacgggctcgtgacagacggagagtatctcgccggtgcagccggcctgccgcagggcggtggccaggtgcagcgcctccgccggggcggcggcgtgagaaatacccaccggcgcagacttatcctccaccatttcttcatacaaccggatcagcgtatccatggcctttttgcggccgcgctccttgctgagcaccacgattttgccctccggatcgccctgtaggatgggcttgatctgcagcagtgtgccggcaaaggccgcggcgccggacagccggccgcccttgcgaaggaatttcagatcgtccaccatgaagtgctggcgcatcttgccgataagctggttggcgcgggccacgatcgtctccatatctgcgcccttctgcgccatatcggcggcttccagcacgatgagcccctcgcccagggaagcgccgcggctatccagcacgcgtatgtcacggtcggggtagcgctcgcgcagctcctgcgccaccacgctgacgccccagcaggtgccgctgacaccgccggacagccccacatacagcacatcatcgccccggtccagcacaggctccatggcctcgcgggcggccagcggtgtgatcatagaggtcttcacctccgcacccttacgcatagcctcgtaaaaggcgtggccgtcaaagggcttggatatgtccaccggctcaccgtcgatggtataggtcaggcacaactccgtgataccgtactgcgcccgcagatccggcggcagattggccgcgttgtcagtcattactttgatcataatgcgtctcctttgaggatagatatgtattatattacagccgtgcgcgcacccagtcggccagcgtgtcgaacaggcagcgatagccggacatggtcagatggatgccgtcggcggcgataagaccggacaggtcgcgctggggcaggaactgccgccgcacgtcgataaggggcacgccctcggcaaaggccagagccgccaccgcgtcggagtacagctcctggtggcggtaaatgcgtcccacatctcccagccagcgcagcacgctgccgccgtccgtcttttgggagataaatcggaaataccgctgtccgtcaatgggcggcagcgtcatcagcaccggctgcacgccggcggacttcagcgccgtgacggcgcagtgcagcttctccgtaaactccggcagggtcgtgcggggcaggtggtcctgctccggcgcggcggcgacggcctcccagtcgaaatcgctgtcgttgccgccgtaagccaccagcgcccagcgggcatccatgccccgctgcacatcgtgctccaccaacgccaggcctttggtcactgtggcgcccatcttggcgcggttcaccacctccagccggtcgctgggatactgggccatcacctccggcagatggaagtggtagcgcatatccgcgtcgggcatggtggccttcagcagagaatcaccgtagataaaagcacgttccataggactgcctccccatgtggtttttatctaatatagcatattagcacacgcgcgtcaacagatttttctgctggatttcttgcatgatgtgcctgtatgtggtatactatacagcaaatcggatacaggggtgtcgctatggaatatgacaaggaattgatcgcccacaagctgcagcggtgggacaagttcatcacggattatcatctgccggactgggagacgataccggatttcggcctgtatatggaccaggtcatcgtactgctggagcagtatctcagcttcattcccgcgccggtgggcggcaaggagcgctttgtcacgtcctccaccatcaacaactacgttcggctgaagatcatgcccgcgccggagaagcggaaataccaccgcatccacatcgcgtacctcatcatgatcctgaccatgaagcagagcctgagcatcagcgatgtgcagaagatcctgcccgctgacagcaacgagacggacgtccgcgcggtgtatgaggattactcgctgaaattccgccgggtggggctgtttttcaaccagcaggtgcaatccgggtcggagggcatccgcagcgccaacgaacagaacggcaataacgccgtggagctgctggtcatcgaaagtgcgctgatcgccgggttctccaagatattggcggagaagctgatacgcctgtgcggcgcagatgccgaggatgtgctggccgcggagcagacaccgccccagccgtgatcaacagggctattgtatagcatttccgaggggaatatgtgaacgaactataaaatccgtggccgaaaggccacggattttcttatggcgcggcgcatatactcccgcgaggtgatcgtatgaaaaagctcctgccgtatgtgctggcattccacgccgccctggccgcggcgatcctgctctgggcgctgcaggaaaagttccccggcccgctgaccaacacgctctcccccgtatggaacagcccatgggagatgggcaaagccgcgttctttcccctgctggcggcggcaccgacgctgtgggtgctgcaaaagggcggcagccggggcggactgtgcctgatggccctgtccggcgcggcgctggccctggcgcttgcctggatgccgctggcgccggcggtggtggccgtgctggctatcacggcggcgctggccctgtacgccgccctgtggcggcgcgtctccggtgacgcgctgccctggtacctgctgactgccgcactgagtgtggcctatatcctgctgaccattttgccccccgccggcggcatatttaccccgtataccgtggcgaccggcggcaccatcccgttttgagggccaaaaaccctcccccttggggtacggcctgtttccctcgtaggggccgatgcccacatccgcctgcatgcaggggttcccgctgaacacccgtaggggccggcgtccacaatgcaggggcccccgctgaacacccgtaggggccggcgtccccgacggcccccaaaaaggcaccccgtagggatgcctttttgttattcaagctcgaaaggggctaaattatctctggccgtcaggccagggataatttagcgcaaaaaaagaaaggcccagcgggcaagcaatctctattcaccccacccccgccagggggtggggtaattaagcgcaaaaaaagaagcaccccgcagaaaagtagcattcactatccctcccgcggcagcgggagggatatatatttatcccccgcggcagcgggggatatttatttcgtccgcgccgttaggccagagataattaagcacaaaaaagaaaggcccagcgggcaagcaatctttattcaccccacccccgccagggggtgggataattaaagtaaaaaaagaaaggcataggggaaaacaccctttactattcctcccgcggcagcgggagggataattaaacacaaaaaaagaaaggcccagcgggaaagcaaactctattcaccccacccccgccaggggggtgggataattaaacacaaaaaagaagcaccccaaaaagaaaaatcatctatattatccctggccgttaggccagggataattaaacgcaaaaaaagaaaggcccaatgggcctttctcttttttgtgtttaattagaactcctttttcttgccgatgacgacggcggagccggcgacggaggtcagagccataccgacgtacatagcgatacctgcgtcaaaggtcttgggggacttgttggtgtcggtgggcttggtggtgtcggtcttgccatcggtgtaggccaggtagatggtctcgccatcatcgttcacaaacgcctcaacattcttcagaccggaagccttagcggcagcataggtcttgtagatggaagcaacagtgccgcagtcagagcacttgtaagaaacgaccttgccatccttctcgacagcaacccaagtgtggccaaccagagtctgctcaccagccagcgtcacggaaaccagcttgccgttcagcaggacatacacagcgctctcagcatcgctggccacaaagtacgcctcaccagcgtccttggtgccgttatcagaagtgtatttgctggtgttcacatagtaagtgccatcggcatcaacatcaagctggccgcacttgtcaccaatcttggtgaaagcctcaaccttggcaacatagctagcaccagtattaacgtgcttcaggtacagtgtggaagcaccggacttggtgagctgcagatcgaaatcagtcttgtctgccttggtgtaatcaccgttgtagccagtgtttgcagccgaggcaccacttacagtgtagtaagcaacattaccaacgccggtggctttgttgaacgcagcctcgtgagctaccacagaaaagctttcagcatccgtggtgttcgccatcagcttttcgccgcctctggtatagccggtataaccagcaacaggatccgccgcgaacgcggtggtgcacagtgccagagccatgaccatggccagcacagttgcaatgatcttcttcatgtttgtttcctccataaaaatttgtttgcgtccggttcagctttgtcactcggaccaccgtttacaacgtaaacatcattatgttgtaaaaatttttacggattttattaccagttatttccatttttgaggtagtgacaccgcgccgttaaaaatcgcccgtaattggaaataatttccatttcttccataatttaccaggaatttacgcaatttatctgagcacctgcaaagcgtaattcttgtgtaacgcagcatttatgcaattcaaatggagattttcaaaaaacgcaacaacttagctggaaaaattttccagctaaaatcgaaaagtcattatgtaaactattcggcccgaaatgcgccccaaatcccgttcataattcggttacaatttaggcaagtgaagtggtttttgcgtaaagtgaggttggttgttttttctctcccccagtcgcctacggcgacagccccctcccagagggggccaaggcggctgacgccgcgacgagcggattgccacgccagtctgcggactggctcgcaatgacacctcatccgtcaacgcttcgcgttgccaccttcccctcaaggggaaggcagggggattccgcgccctgcgggcgcgagccacttttgcccccggcggcaaaagtagccaaaaacgccgcttagacctacggtctaagaaccccttggcgcggggcgaaacgttccttgcgggtaattttcccacgcgaccacggagatttttccggttttttcctcggtcagaaggactgtgccagcacagcttcccgcgtggcgctgtcgcgcgccgctggctggtgccacggtaggggttttgcgttctatcgcttttggcgattatcaaaccgcgccaaagccgcccggagggcggctttgggaggtgcacccccgggcgcgggggtacatctgcgaatgtttcgttaagatgtcgttaagaaatcgccaattttcttgaaaaccagatttcagagtgctaccatgaaacaacgtagggggcgcgaggtacaggccccgcgcgacaggaggggagctcccgggcggcagatatcatctgttgcccgggagccttattttgcctgctaaataccccggctgcgcttttcgcacagccggggtatcggtcaatttatttgctgtccggcaggatgcccagcagcaccaatggcgcatctccggtgttatcaatgccgtgggtgtggccctcgggacagtagtgggtcatgccggcggtcaggggtacgtccatcccatcgtcgtggcatacaccgcagccggacagcacgtgaatgatctcacagttgccagtgtgggtatgcaggccgatggaggaccccgcgggcaaggtcaatgtcaggatacggcccatgccgtcggcaacggcggtgcggacgtgggcttcgccggtgccgcccttgaaatgcggcacaacggtcggatcgacagcgttaaaatccagcgtcatttgagtccctccttatttcgatttccgtatgcgatcggtgatggcctgcccggtgggcgtaacggccagaccgcccagcgccgtctcgcggaattccacgggcatacggcggcccacctcgcccatggcgtcgatgacctcgtccacgggaatgcggctggtgatgcccgccatggccatgtccgccacgctgacggcgttcaccgcgccgatgacgttgcgcttgacacaaggaacctccaccaggcccgccacgggatcgcagatcaggcccatcaggtttttcagcgccatggccaccgcgtggccgatctgctcgccgctgccgccccgcagggccaccagcgcccccgccgccatggcggaggccgtgccgatctccgcctgacagccgccggaagcgccggcgatgcacgcccggtaggcgatgaccgcgccgataccactggccacatacagggcctccagcagctggtgctggctcagctcctcgtacctgcacaggggcagcagcaccgccggcagcacgccgcaggcgcccgccgtaggcgccgctacgatgcggcacatacaggcgttggactccgccatggacagcgcctcggcgatgacctcgctgacgtagccgccggacatggcttcaccccgcaggcagtactgccgcattttcatgccgtcgccgcccaccaggccgctgacgctcttgcgccggccggtgtagctgtccgccgcgtcggccatggcctgccaggtgatgagcattttagccatggactggttccgcgttacctggcgctcgtccatatccgtctccagcacgatctcccagaagggcttgccctcctgctccatgcggtcaaatatttccttcatcgaatccagagccatcgtcatcctcctccttgtcgtagtaggtcatggacagcacgcccggcagctcggacagaaacgccacctggctgggcttgaggtgctgatccagctcgatgaccatcagcgcgtcgccgccacgcttgtggcggtacagactcatgttggctacgttgacgcgcagctggcttagtatgctggtgatggccgctacggtgccgctggcgtcctgattgcggatgaccagcgtgttgaacataccgttgaagttcacgtcgatgccatccagcttgttcaccatgatacggccgccgccaatggacgaggcctgcatggtcagtgtcctgccgtcggcgctcttggcctcgataacagcggtgttgggatgggcgtcgcggagcttgatctcgtctatggtgtaggtcaacccggctttctccgcctcggcaaaggcatccggcaggcggggatcgtccggcttcatgcccagcagaccgcctaccagcgcacggtccgtaccgtggccggcgcccgtctcggcaaaggagccgtagaggtggatggcggccttgaccggcggcgcacccagcagtgtgcgggccatggcgccgatcttggcggcgccggcggtgtgggagctggagggaccaatcatcaccgggcccagtatttcaaagatatccagcatagaaaaactcctttcagagtgtgtcgagggtattgtaccacataatgcggcgcgggacaatggctttgtgggtggttgtcggcacgtcagattgacaaaaaccggcaaacggcttataatacatctcaaggacgctgcaataaacggcaggcggttagtcacagccccgagagggggtgacatacatgttttggacgcttacattccatatcgcaggctattcagtctcgatcagaattcagaagctgaaaagacgaaaccgccactctgccaagtgacggtttcttttggggtgtaaaaccctgatgcaaatctttacttgatggggctgaccgcttgtcgcagcgtccccttctgcttattattatacccattccggcgggtttgtcaaggggcagtccccgccccacaaattgcggcaaaaaaagaaaggcctagggaaaaacaccctttactatacctcccgcggcagcgggaggaatatatatttatcccccgcggcagcgggggatatttatttcgtccgcgccgttaggccagggataaataagtacaaaaaaagaaaggcccagcgggcaaacgctctttattcaccccacccccgccagggggtgggataattaaagtcaaaaaagaagcacctcatagaaaagcaatctttactgttcctcccgcgccagcgggggaaataaaataatcattcctcccgcggcagcgggagggataattaaaggcaaaaaaagaaaggcccaatgggcctttctcttttttgagtttaattagaactcctttttcttgccgatgacgacggcggagccggcgacggaggtcagagccataccgacgtacatagcgataccagcgtcaaaggtcttgggggacttgttggtgccagtggaaggagtggtggaagcaccgttaggaacgacaacataaccagtaacgccagtcaaggtctcggtcttagaaccagcaggagccttaccagtctcatagatagcggtggtcttggagccgcagatgccgcagacagcctcagtgggaacgaccttgccgttctcaaccttggaagcggaaacgacccaagtgtgagccttcacctcggcatcggagccagccagcttaaccagcttgccgtcaaccagaacgctccaatcctcgccagccttgaacaccttgccggtgtgctcgccagtggtgatttcgtaatacttgctgttgtcggtgttcacgacctgaccgcacttataaccaaagtcagtgaaagcctttgcggaagcagcatacgtgggagcagcgtcaaccttggtcacatagaacagaatatccttcttaccagtgacagtcacagcataatcagcaacagtgggagtggtggtcttgacgtagataacgctatcagcatcagtcagatactccaggttgccagtgccatcggaatagctggcagcagcggtgatggtgatggacttgttggtcttctcggccacagcgccattcgcagcgatgaccttaccactgatgttggtgctattggccagatacaggtcatagttgtccgccgcgaaagcggtggtgcacagtgccagagccatgaccatggccagcacagttgcaatgatcttcttcatgtttgtttcctccataaaaatttgtttgtgtccggttcggcttcatcctccgagacagcgtttacaacgtaaacatcattatgttgtaaaaatttttacggattttattaccatttatttccatttttgagatagtgacatcgcgccgttaaaaatctcccgaaattggaaataatttccatttcttccataatttaccagtaatttacgcaatttatctgagcgcctgtaaagcgtaattcttgtgtaacgcagcatttatgcaattcaaatcgagattttcaaaaaatgcaacaacttagctggaaaaattttccagtcaaaatcgaaaagtcattatgtaaactatatagcccgaaatacatccaaaatcccgttcataattcggttacaatttattcggcgaaagtgctacctgcgttttggtgcgtaaaaggaacttcgccgtcccggcggcgcggaggctggcgcagccgcttgccccagccacggtagggacgttttcttctaccgggcgggcgattatcaaatcgcgccaaagccgcccggagggcggctttgggaggtgcacccccggacgcgggggtacatctgtgaatgttacgttaagatgccgttaagaaatcgccaattttcttgaaaaccagatttcagagtgctaccatgaaacaacgtagggggcgcgaggtacaggccccgcgcgacaggaggggagctcccgggcggcagatatcatctgttgcccgggagccttgcttttcccaaaggaaaaacccaacagcctcgctaaaagcgcggctgttgggtttaccataatatatattattgttaacttacagatgcttttccggggcctgcatgtccctgctgatctgcttggcgtagcggtcctcttcgctgaacacgcagccgcagtacttctgcatatacagccccagctcgcgggcctcctgctgcccctggcggaaaccgggacgaaaatcacgatacaggagtgtcacaccgtactgcgcggacacctcctcggcggtttgacgcagcaactcatggttctggtatgggctgacaaatagggtgctggaaaagctctcaaatccgtgttcagctgcatagcgggcggtctgctccagccgcaggcgatagcaatggccgcagcggtgatcgatgtcctctgccacggcgcggcaaaaatcccgcaggccgtagtcctcctgcacgatcagctccacgcccacagacggcgcataggccatcagtgtgtcgcggcgggccttgtactcctggtaggggtggatgttggggttataccaataggacaccggctcgataccctcggcccggagtagctggatacaggccacggaacagggcgcacagcaggtgtgcagcagcgttttcgtcatttctgtttcctctttccaaagggcaggcggacgttgcccagcagttccttcagcggcttgccggcgtgctcgcggggctgcagggcggacaggaaccgggcgcagacctggcggaagggctcctgctccagcgcgtcgaagaaccgggagcgatccacggataccggcgtaggtgagcgcagcgcacggtcggcggccacggcctcggccaggccgcagcgtcggcggtgaagcggcagactgtcaaacatctgggcgcccttagcggtattgatgagcagcagcgatacgcccaggcgcttttcctccggggtgatggcgccgccggtcatgtcgcacagcgtcaggtcaccggtacggtccgtgctggtatagccgcaggtgtggcaggcgggccgcaggaacataccccgcgccagcccgcgtcccacctcggaccgcagcagcggcgcgtcgtactgcccgccgttttcaaaggtcacatggaagcggcgcgtgctctcaccgttcagcttgccgcggaagtccacggacaggggcttctgctgcttgatgtacgccatggagcgcacgaatttttcccacacgccggggctgcccacgccgctacaggccacgtcacaggtgatgagccgttctgggtgctcgcccagatagcggtacaggccgtccacctgacagggcgtgccggaaaacagtacctgccggccctgatccagatacagccgtacctgctgatagctctcacccacgtcgctctgcaccggcttgctcccccgcagtcggggcagatcgtgcaggtttttcacggcgatgtggctgacccgcaggtcgttgtccagtgccgcgccgaacaccacgccgccgccctccagcacgtattccgccagggcggagaacgcgccgccggcggtggagtcacgccgcacggcctcgtcgccgttccagacgataaacgctgccggctcggtgcgcggctcccgctgcttcagcaccgggcagatatgcgtgcagtggccgcactggacgcagccgtcggtcacctgcgggtacagaaagccctcccggtccggcaccatgcggatagcgcccttgggacagccattgcagcacgcggcgcagccggtgcatcgctcccgcggggccaactgcggcgcggtattcatctcggtcatggcggccacctcccgacttgttttcttttgtacattgtaccacacgccggcaaaaagcacaagtgcgccgaagaactgtccgttttttcggacagcaaacttggtaagatgggtacagtcaaaggaagaacacggaattcatgatattggaggtgccgtatgcacaagttttttgactatctcgcgcccgatctgccggtgaagactattggtgagttggcgggctacattcgccgctttgcggcgctgttcagcggcggcgtgccggtggagggccatatgggcggcgtggtgttctgcgccacggagcagcccggcggcggcgtccgcgtccactgggtccaggtagaccgccagcgtatcccggtggacgctaccgtctgacgcgcttttcttcggggcagctacacggcagggaaacagggagacgccataggcgtctccctgtttcccttgcgtttccgacagcatgggagtataatatatctaatatgactttttccgcgaggaggtaagacggcgtgatcgtgttggatctggaatggaatcagccctttggcgggcggcgcatggaggagatcattcagatcggcgcggtgcggctggcgcgccccggcggccccgtagtggacgcattcaacgcccacatccggccgtccatctaccgaaagctgtcgcctgtggcgaaaaagttgccggaatccgcccaggcgctgacgtctgagctggacttccccgcggcgtatcaggcgtttctggactggtgcggcgaggataccctgtgggccgagtggggtgcccaggaccacggcgtgctggccgccaacgccgcctattggaagctgcccgcgccgccggtcacagcgtgcatcgacctgcaggctgccttctgccggacgctggagatcggcctgggtaggcgtatagcgttggagcaggcggcggagtactgcggcctgccgctgatctatgagttccacaacgccctgcacgatgcgctgtacgcggcgctgatcaccgcgtggctgacggagagctctctgctgcccaccgcgccccgggctgaagccaagcataagcgccgccgcggcgttaagttcagccgtgagacgtaccccaagcagccccgtcagaagatcacaccgctgccggagcgtgagcagctgctcaacagccgtcaggcgcgtatcgtgccctgccccctgtgccgccagcctggggccgtggagtcgtggtatccccagggcgacgtgtattacggcgtgttccgctgtgaaaatcacggcctgttccccgtgcggatgtccgtggtgcaccgtgaggacggtagctggcagggtcgccgcgtggtgccgcccctgaccgacccggagcgagccgcctttgccgccgcccgggagaacgagcccttccactgcacccgcgaaaaggccaagcgccgccgcaggcacagaaaaacgaagtgaacgagagaagccttcccctgtcagggagaaccgcaaaagaaccgccgcccggcggttcttttgcggttgtcttccccctgggggtggtttcaaaaggagggggccgaagccccctcctttgtcgcttcaaggggataggatccttaaggaaagggggaaattcgaaatccccctttccttaagtggcgttctttggctactttctttcgccatggaaagaaagtagcttgtgcccgcaggcgcaacacccttcctgccgcaggcaaaaaagaagcacccgctgggccggaagcatttatatcccccgcggcagcgggggatatttatttcgtccgcgccgttaggccaaggataaataagcacaaaaaagaaaggcctttcggcctttctcttttttgagtttaattagaactcctttttcttgccgatgacgacggcggagccggcgacggaggtcagagccataccgacgtacatagcgataccagcgtcaaaggtcttgggggagggcttgttggtgttgggggtggtagaagcagccttctcagtcagaacatagtagtaaccactatcagcagccaggttgatatccttaccagcagcgttcagcagcttagcagcatcggcgggcttgctgtagtagatcttggacagcttgccaacagcgtccttgtccttgtcggtccaatcggtgtcggaaaccatagcgtaggtagcagtaccggccaggttggtgtagacaggagccttgttggcaccgaaagtctcagaggtcttgtacagaacagtggtagcctcagcagtcttcaggctgtcattcttgctaaactgatagtaagcaacagcgctgcccagttccttgccgaagtagaaaatcttggcagaagtaccgtccttggtagccatattggccttgttggtgttgttggccttgtcgtaggcatcaacaacagccgcctgggcgtaatacatgccatcctcagcctgatacacatcaaacagataaccagcatcggtcatcttagccagagtgttcttgctaaaaccgccagccttaataacagcaacctcagcatcggtagcaacgcggatggtcttggtgccggtctgaatatagtactggccatcagcaggggtaacatccttggtataaaccttttccagagtcaaggtaccagtcgggctcaccttagtgtaatcgacaccatcaatggtgagatccgccgcgaaagcggtggtgcacagtgccagagccatgaccatggccagcacagttgcaatgatcttcttcatgtttgtttcctccataaaaatttgtttgtgtcggacttgacctcgccactctcaccagcggtttacaacgtaaacatcattatgttgtaaaaatttttacggattttattgccagttatttccatttttgagacagtgacatcgcgccgtcaaaaatcacccgaaattggaaataatttccatttcttccataatttaccagtaatttacgcaatttatctgagcgcctgtaaagcgtaatttctgtgtaacgcagcatttatgcaattcaaacggagattttcaaaaaacgcaataacttagctggaaaaaatttccagtcaaaatcgaaaagtcattatgtaaactgttcggcccggaatacgccacaaatcccgttcataattcggttacaatttaggcaagtgaagtggtttttgcgtaaagtggagggagttgttttttctctcccccagtcgcctacggcgacagccccctcccagagggggccaaggcggctgacgccgcgacgagcggattgccacgccagtctgcggactggctcgcaatgacacctcatccgtcaacgcttcgcgttgccaccttcccctcaaggggaagacagggggattccgcgccctgcgggcgcgagccacttttgcccccggcggcaaaagtagccaaaaacgccgcttagacctacggtctaagaaccccttggcgcggggcgaaacgttccttgcgggtaattttcccacgcgaccacggagatttttccgtttttttcctcggtcagaaggactgtgccagcacagcttcccgcgtggcgctgccgcgcgccgctggctggtgccacggtgggggttttgcgttctatcgtttttggcgattatcaaaccgcgccaaagccgcccggagggcggctttgggaggtgcgcccccgggcgcgggggtacatctgcgaatgttttgttaagataccgttaagaaatcgccaattttcttgaaaaccagatttcagagtgctaccatgagacaatatagggggcgcgaggtacaggcctcgcgcgacaggaggggagctcccgggagacagatatcatctgttgcccgggagccttgctttgctgtgcagagaaaaagccgcccgagggcggctttttatccgtaaagaaatacgtacaaagcagaaagccccggcagagccggggcttggtgccctatgaccggtttcagttctcctcttccgcgcgcaggtagatcgtcaacagagacaacagctctgaaacagaaggcttctccgtcaagtgtcgatgtgcgagctctgacagcttctccggcgccgtgttccaggcaacgtttgcggcgcggcgcaggccgcgctccacgcacttccagtttgtgtcaaagcagcgcgccacgtccggatacacatgctttgtgaccagcagaagcctgtccggctcccgcagcgacagccgaagcgcctctgccatataaaaatagcagacgctgctcggcaacaaccccaagccgcacaatgtgcggctcacatcccccttatccatggatgctacgccacctctttaccgtctaatttttctgtaattttgcgaaagtcgttcagaagctctgccacctcatcttccttcagtatgaggagcagggccatcaatgccggggcggaaaagcagaattttccacgttccaggtcgccgtaggcccgcgccgtgatacgaagcttttcggccatttcttcctgtgtaagcccacggcgctgccgcagttggcacacatagcttgacagatgctcccgcaccgcgtccttatactcctgcatggcaaatgcctccgtttccgctttataagaagatgatagcgcagcgggaagtttacttccacgaagtatacttccatttattggcttttttgtcatgaaatagcgaaagcggtacacggtgcagcgggacaacgcagggtaaaaagggcaaaaacaggctgacaaaactattgcatttttggagaaatcgttgtaaaatacagatgacaatccaagattggtagctgtaaggaagtgcttcgcgcacgggctgaaactatcactcggcggacgcttgagtgtttcaaaccctcggaaacagggtttggggcactttttgtttaccggggagtagagccatattggggagaacacacgaacactatcggaaacaaaggaggaatacacatggttctggtaacaaatggacggctcattacccgcgacagcgagggcaagggctactatgagcacggcgcggtggcctacgagggcgccaagatcgtggagataggtgaggaagccgctctgcgggcaaaatatgccgatgccgagatcgtcgacgccaagggcggcgtcatcatgcctgccttcatcaacgcacacacccacatctactccgcactggcccgcggcctgagcatcgtgggcaacaaccccaccaacttctacgaggtgctggacggcacctggtgggccatcgaccgccacctgatgatggacggtacccgcgcttccgccacagcgctgtacatcgacagcatcaagcagggcgtgaccaccatctttgaccaccacgccagctatggcgagatccccggtactctgtttaccatcagcgaggagagccgccgcctgggtctgcgctcctgcctgtgctacgaggtcagcgaccgcgacggcgaggagaagtgcctgcaggccatcaaggagaacgcggacttcatcacctactgccagaagcagaacgatcccatgctggcggccatgttcggcggccacgcgctgttcaccatcagcgacaagaccttcgaccgcatggtggaggccaacaacggccgcaccggttatcatatccacgtgtccgagggtatgaacgacgtgtacgacagcctgcagaactacggccgccgtcccgtgcagcgcctgcaggaccacggcatcctgggtgaaaagaccattctgggccactgcatccatgtgaacaccgctgagatggacatcatcaaggagacgggcaccatggtggtgaacaaccccgagtccaacatgggcaacgccatcggcatctgcccggtgctgcagctgtacaagcggggcatcctgctgggcatgggcaccgatgcctataccaacgatatgctggagtctctcaaggtggccctgtgctcccagcggagccagaactgcctgcctaacgtgggctggtgcgaggtcacggatatgctgttcaagaacaacgccaagatcggcgcacggtacttcccggaccagctgggtgtgctgaaggccggcgcggcggcggacattatcgtcatggactacaagccgtttaccccgttcagcgacgagaacatcgacggccacatgatcttcggcatgaccggccgccagtgccagaccaccatcgccgccggcaaggtcctgatgaaggaccgcgtgctggtgaacatcgacgaggaggccgaaaacgcccacattctcgaggccgccaagaagctgtggggcgacctgaaccaccgggtgtattgataaaatcaacgacaaggaggaagacccatgtctgaaaaaatgtatccgatcccctttaagtccctgatgaactgggtggtcaccgaatatgccaactccggcgagatcttcggcgtccgcaaggcgtaccacgccacgggcaagagcctgcccatcttcggcgagcgcatcgagacaccctttggccccgccgccggccccaacagccagcttgcccagaacatcatcgccgcctacatggccggcgcacgcttcttcgaggtcaagaccgtccagaagatggacggcgaggagctggccgcctgtgtgccccgcccctgcattctggccaacgacgagggctacaaccaggagtggtccaccgagctgaccgtgccccaggccatggacgagtacatcaaggcgtggtgcgccctgaaggtgctgagcaaggtatacggcttcggcgatcccaatggcttcgtgttcaatatgtccgtgggctacgatctggagggcatcaagggcgacaaggtcaacacctatatcgagggcatgaaggacgccaccaagaccgccatcttcggcgagtgcaaggccgtcctgaaggagctgttccctgccgagagcgactatatcgacgccattgatccccgcgttagccgcagcgtcactgtgtccaccctgcacggctgtcccccggatgagatcgagcgcatcgccagctatctcatcaccgagaagcacctgcacaccttcgtgaagtgcaaccccaccatcctgggctacgagacggcccgccgtattctggacggcatgggctatgactatattgtattcgacgaccaccacttccgcgaggatctgcagtgggccgacgcggtgcccatgttcgagcgtctgcaggcgctggccgacagcaagggtctggagttcggtctgaaactctccaacaccttcccggtggacaccacccgcggtgagctgcccaacaacgagatgtatatgtccggccgcagcctgttccccctgaccatcgagatgtgccatcgcatttcccgccagttcaagggtaagatgcgtatctccttcgccggcggcgcggagtatttcaactgcgacaagctgttcgcggcgggcatctggcccatcaccgttgcgaccaccatcctcaagcccggcggctacaaccgcctgctccagatggtggagaaggtagagcccatgccctacaagccctttgacggcaccgacacccaggccatctgcgacatgagcaccgcctctcacaccgacgtgcaccacgtcaagcctatcaagcccctgcccagccgcaagagtgagaagaacgtgccctggatcgactgcttcaccgcgccctgcaagggaggctgccccatcgcgcaggacatccccgagtatatggagctgtgcaacaagggcctgtacggtccggcgctgaagctgatcaccgagaaaaaccccctgccgttcctgaccggcaccatctgcgcccatcgctgtcagaccaagtgctcccgcaacttctatgacgagtccgtccgcatccgcgacaccaagctgctggccgcccagaagggctacaacgccctgatggcctccatcaagcgtccggagcgcgtggcgggcaagaaggtcgccatcatcggcggcggccccaccggcattgctgccgcctacttctgcggccgcgccggtatcgagaccaccatcttcgagcgcgagagctgcctgggcggcgtgccccgtcacgtgatccccagcttccgtatcgccaacgaggccattgagaaggatatcgccctcatggagaagtacggcgtcgaggtcaagtgcggcgcgcccgccccctccgtggccgagctgaaaaagcagggctacacccacatcctgctggccgtgggcgcatggaagcccggcaagctggacatcgccggcgatgtggccggcgccatccagtggatgaagggcgtcaaggccggcaacatcgctgtggccggcaatatcgtggtcgtgggcggcggcaacaccgccatggacgcggcccgtctggccaagcgcagcggcgccgagagcgtgaccctcgtgtaccgccgtacccgcaagtatatgcccgccgacgagcacgagctggcgctggcgctggccgacggcgtgaccttcgccgagctggctgcccccgtcaagcaggccgacggtgtgctgaagtgtgagaagatggtgctgggcgaggccgatgcctccggccgccgcagccccgtgggcagcggtgagttcttcaccgtcccctgcgacctggtgatctccgctgtgggtgagcaggtggacgacgcacttatggccgccaacggcattgagttggacaagaagggccgtcccgccttccagaccaacgtggagggcgtctacgccgccggcgacgccaagcgcggccccgccactgttgtcgaaggcatcgccgacgccgcggcctttgccgaggcagttatcggcaagccctatacctatgacatccccgagcaggcctatgtcactaaggcggacgccgaggccaagaagggtattctgaagatgagcgcgtgcatctgctgcgagggcgaccgctgcctgcagtgcgccaccgtctgcgaaaactgcgtggactcctgccccaaccgcgccaatgtggccatccgcatggccgacggcagccaccagatcgtccacgtggacaagatgtgcaacgagtgcggcaactgcacccagttctgcccgtacagctccgagccctgccacgacaagttcaccctgttccagactgcggaggacatggtggacagccacaatgccggtgtgctgttccttggcggcgacaaggtccgcgtccgtaccttcggcgagccgaaggactatgacctgtccggcaaaaacgacctgcccgccgatctggagaagctgatcgtcaccctgcgcgacaagtacggctacctgtatctgtaacgtatatccgccccggtgtcaaccgggaaatgcaaaaaagaaccgccgctcggcggttcttttttgcggttgccttccccagagggggtggtttcaaaaggagggggccggcgtccccgacggcccaaaaaaaggcaccccgtaggggtgcctttttgttattcaagctcggaaggggctaaattatctctggccgacaggccagggataactaagcgcaaaaaaagaagcaccccgcagaaaagcagcatttactatccctcccgcggcagcgggagggatatatatttatcccccgcggcagcggggaatatttatttcgtccgcgccgacaggcgcgggctaattaagcgcaaaaaaagaaaggcccagcgggcaagcaatctttattcaccccacccccgccagggggtgggataattaaaggcaaaaaaagaagcacccggtagggtgcttctcttttttgagtttaattagaactcctttttcttgccgatgacgacggcggagccggcgacggaggtcagagccataccgacgtacatagcgataccagcgtcaaaggtcttgggggacttgttggaatcgggcttggtctcagtgggagtgttggaagcgtcagcgacgacccacacgccagcgacctgatcagcgtcagcaccattgggaacttccacgaaggacttgtagaccttaccggtagtgccgcagttggagcacttggcagcgcccttctcaacgtcgacaacccaagtgtgaccaacagtgttggcggccagagtacccagatcgctggtaatgacaaccttgccatcaaccagcagcttcacggtgctaccgcttgcggtgtcaacagccttgaacaggtgaaccttctgatcggtagtgtcggtagcggtatagaacttgtcgttcacggtctcaccagcccgcagcttgtactgaccgcacttggagccgatctcggtgaaagccacgccggtgccatcataatcaaccgcatcaacctttgccaagtacatagcgacagtgttcttgtcggcatacttcagaacgatgtcagcatcagcagtcttagtgaccttgacatacataatgtctttggtgctgtcaaacgtgtcactttcgttcttggcaagccaatagaaggcgatagaggtcttggttgccttctcatacatcagataggcatcctcggcctcggtggcgccggtctcggcgtcaaaggcatcgtactgctgagccgccgcgaaagcggtggtgcacagtgccagagccatgaccatggccagcacagttgcaatgatcttcttcatgtttgtttcctccataaaaatttgtttgtgtccagcgtcgctccgtcactctcgccagcggtttacaacgtaaacatcattatgttgtaaaaatttttacggcacattttttccataatttgccaaaatcaaaatacgctccccacccctgcgggggcggggagcgttcagctttccggaaatctcccggttttcctcaccaatttcgtgtccggcagggccaccacatttctcgcctgtcccgttcgcgatttgtttacaatttatttcgctaaagagaattcctgcattctgacgtaaagtgccttcacttgttttacccctcggcggccatatcttgcgcgtgcgctccgtcgggggacaggctatcccggcgcggaggaagctcacttccacatttttgcccagtattttccaaaaaacgcttacaaaacagcgcgcaggccttataatacacctattatatatattggaggcccgccatgaccatcacaaccgaccagctgacgcagtttcgcgccctgctgaaaaacgaggaaaaatccgccgccaccctgaacaaatacctccgcgacgtccagcgcttcgccctgtggctgggcgacacgccgctggagcgcgacgccatgctggactacaaggccgaccttatgcgccactacgccgccggcagcgtcaactccatcctggccgcgctgaaccgttttctccgcatgatcgcccgcgaggactgccgcgttcaccgcctgcggatccagtaccaggcgtacagccccgaggaacgtgagatcaccgcccaggagtacgccgatctggtccgtaccgcccgggagacaggccgcgcccgcctggcgctggtgctgcaaaccatctgcgccaccggcatccgcgtcagcgagctgcccgccatcaccgccgaggctgcccgccgcggcgtagccgtggtgcggtgcaagggcaaatcccgccgcgtgctcatccccacccgcctgcaaaagaagcttctgcgctatatgaagcagcaccgcatcgccttcggcccggtgttcgtcacccgcagcggcgcacccctggaccgcagcaacatctggcgcgagatgaaggccctgtgccgcgccgccggcgtctccgacaaaaaagtgtttccccacaacttccgccacctgttcgcccgcacgttctaccggctgaacaaggacctggccaagctggccgacctgctgggccacagcagcatcaacaccacccgtatctacatccgcaccaccagcgccgagcaccgccgctgtctcgagcgtatgcgcctggtgctgtaaaccgcgcctcccgcccttattgtcccccttggcggaaaagatgcaccttgacaactgaatttgacaaaaaatcgcccaccatatataatacagcacaaggacgctgcatacataggcgggcggtcagtcacctcccctcgaagggaggtgggacagtatgttttggacgctgacgttccatatcttaggctattcggtctcgatacggatccaaaagctgaaaagcagaaaccgccaccgggcagggtgacggtttctgtaggctacaaagcctgtaagcaaatctcaactcaccgggactgaccgcctgtcgcagcgtccccttttcatctcctattatatcctatccccgcgatttgtcaagcgccgccgttccccgaaatttgacaaacgccgccacgcggtgtatactctgccacaaggacgctgcatacataggcgggcggtcagtcacgaccccgaaagggggtgacgcgatgttctttgtgtttacgttccatattctgggccactcggtctcgatacggatacagaaactcaaaagcaaaaaccgccaccctgcacggtgacggtttttgcgggctgacatagcccaaaataaactctcaaccaaacggggtcaaccgcctgtcgcagcgtccccttttcatctcctattataccctatccccgcgatttgtcaagcgccgccgttccccgaaatttgacaaacgccgtcccgcggtgtatactccgtcacaaggacgctgcatacataggcgggcggttagtcacggccccgaaagggggtgacgaaatgttttttgtgtttacgatccacatccttggtcactcgatctcggtgcgagttcagaaactcaaaagcagaaaccgccactccggcaagtgacggtttctgtaggtcgataagaccttaacgaagctctaagttgctgaacggggtcaaccgcctgtcgcagcgtccccttttcatctcctattataccctatccccgcgatttgtcaagcgccgccgttccccgaaatttgacaaacgccgccccgcggtgtatactccgtcacaaggacgctgcatacataggcgggcggttagtcacctcctctcgaagggaggtgggacagtatgttttggacgctgacgttccatatcttaggctattcagtctcgatacggatccaaaagctgaaaagcagaaaccgccaccgggcagggtgacggtttctgtaggctacaaagcctgtaagcaaatctcaactcaccgggactgaccgcctgtcgcggcgtccccttttcatctcctattataacccctctccgcgatttgtcaagcgccgcaaaacaaccccaacccctttacattctgcaaaactatgcgcgcgtccgcaaaacgcacacaaattgtgaacaaatgtccgccttgcgcgctttcgcgtctcaaagtttccccatttttttccagagtatttgtgctgcaacgcacatacacgccggtaaaataccgaatatcgcatacaaagcgcgtttttttgtgttttacgcgcccccggacgcggaaccgaaaccggcataaaagttcagaaaatgtgctgtttttcataggaattgcaacgttttcgaaaatgtaaatcttttttaataattttttacgagtttttttgcaaatccccggccaaaacgccttgatttatctgcgggatgtggtatacttacaaccgtgaaaggcgaagccgagttgttcgggcctgcggtctacaacataatgatgtttacgttgtaaacggtggtccgagtgacaaagccgagtccgacacaaacaaatttttatggaggaaacaaacatgaagaagatcattgcaactgtgctggccatggtcatggctctggcactgtgcaccaccgcgttcgcggcgaacatcgagtccggcttccttaagagcaccgatgctgataaggccgatcctgctacggcggttaccctgtcttataccggcaacaccgatcctaagaccaccgatggcaagaccactgctggtgtctatgcgcattataccatcaatggcaagacttatatcgttgtgaatactctggctgaggctaccgatgtcctgtacaaagaggccgatgccaagaacgtggttctgtacctggctgagattcccactgccaactatgtcgccggtaaggtctacagcgatttcgccgacacttgcggcaagtatgagaagcccgccaactacgatgctactaagacctattacacctatgagtatgctggcaacacctatctggctgttgctgacagcaccactggcgatggcgtcctggtagtggacggtaaggttgttgttgtgacgactctgaccgccgccactaaggttgctcacgttgctgttcccaccgttaaggatggcaagattactggttacacctgctccaagtgcaaggccgttgctgctgaggctcccaacaaggcttctattccttccggtgctgacactaccggtctgaccggtaactggtattggaccactgccaccactccttccactggcaccaccaccaagccctcccccaagacctttgatgctggtatcgctatgtacgtcggtatggctctgacctccgtcgccggctccgccgtcgtcatcggcaagaaaaaggagttctaattagaacccgcttcgaggttaacaaaaaaagagaccgcttcggcggtctctttttcttgcctacggcgcggggggaaaaaagaccgccgtacggcggtcttttctattactctgtcagggttttgacccaggcggaatacttctcgatattggcgtcgcgatcggcggcgtcggcgcccttggtgaggatatacaccttgatcttcggctcggtgccggaggggcgcaccaggatcgtagtaccgtcggccaactcaaagcgcagaacattgctgccggatagctccatcttgctgaccttgccagtggcgcagtccacggcgctgccgtcctgataatccttgcggaccaccacatccacaccggcgatgttggccgggggcgcggtgcgcagggacttcatcagcgccgccatcttttccagaccgtccagaccgggcatgaccagattgtgggtcttctcgccataccagccgtacttcttgtacagtgcctgcagggcatcatacagcgtcatgcccttggcggcgtaccaagcggccatctccgtgatcagcagggacgcggtgacggcgtccttatcccgcacgtagtcgcccagcatatagccgtagctctcctcataggacatgatgacgtggccctcaccggcggtctccagcgcgttcttcttctcggccatgaacttgaaaccggtaaatgtgtcgcagcaggtgacgccgttgctctcggccaccttgcgggccatctcggtggtgacgatggtcttgaggaaatagggatgctccggcatcttgcccgcccggcgcatggcgccgatcagataatccagcagcagcacaccggtctggttgccggtgacggcgatgaacttgccgtccgcgccgcggaccataatgcccacacgatcgctgtccgggtcggtgcccagaatgaagtccgcacccaccttgtcggccagctcgatggccagatagaagccctccgggttctccggattgggggaggccaccgtggggaacgtgccgtccagcaccatctgctgctctacgcagtacaggttcttcacacccaggccgcgcagggcctccggcaccagcttccagccgcagccgtggaagggggtgtataccaccttgaagctgtcggctacctgggcgacggaggtgcggtcgttgaccatggccatgacgttggacatgaacatcttgtccgtctcctcacccagcagggtgatgagcccggccttcaccgcgtcgtcaaaggccatgcgcttcacgccggtgaagatgtcgatctgctccagacgggcggcgatggcggcggcgtgctggggcggcagctgcgcgccgtcggcccagtagaccttgtagccgttgtactccttggggttgtggctggcggtcacgttgatacccgcctggcagccgtagtaccgcacggcgaagctcagctccggcgtggggcgcagggactcgaaaatacgtacccggatgccgttggcggcgcagacctccgccgcggcgcgggcaaaggccatgctgttcacgcggcagtccatgcagatggccacgcctttttgtttggcctcatcgccctcggcggcgataacgtcggcaaagccctgtgtggcccagcgaatgacgtgtacgttcatctggtgcagacccaccttcatggtgccccgcagtccggcggtaccgaattccagcgggccgtagaaccggctctcgatctccttctcgtccccggcgatggcctgcagttcggccttttcgtcggcgttcagcgcgtcgctggccagccaacgctcgtattccctcttatagtccagcatattcaaaaactcctttcaggcgtgttcttccgtttcctcgtcctccaccggccgggaggccagcaggtcctttgcctcctccagctgcgcttcgggcacatacaggctggcgccgtagccggaaaagccgttgatgaccttccccgcgccgccatccagatcgtaatacttgaagcaggggatgccgtaagccgccagcagggagatgatcatgtccgtgtcggcgggagaatcgaaggtctgcatcagcagcacggccttctcgtcctgcccctgcgggtccttgggccacgcggggacgtccggctttccggtgaaattccagttgtccatagtctgcctcctatttgtgatattttgtcccggcggcgatctggtatgcccggtagagctgctccagcagcatgatccgggccatgtggtgcgggaaggtcatgggggacatggacagccgccagtcggccagctttttcacgtcctcgctgagtcccacgctgccgccgatgagaaaggtgatctgcgtctttccctgcacgccgaagtccgccatccggcggctcagctcctcgctggagcagggcttgccctcgatgcacagggccaccaccgcgccgcccttgggcagacgctcccggatggccgcgccttcggcctgcagggccttctgtatctccgccggggagggaccctccggcagacggtattccggcagctccacgatgtccagcttgcaggatcgctgcagccgtttgacgtactccgccgccgcgtcgatgtagaatttttccttcagcttgcctacgcacagaatggtcactcgctgcatacgcacacctccgccgtgtacggcccgctgagctgcgaccgcggcgccacggtcacggcggcgtccagtcccgccaacgcccgttccagtgtctgccgtgcccgctccggggtattgttttcccggctcagatgggccagcacgaactgccgcgtcccaccttctgccagccgccgggcaaacgcgccggctgcggcgttggacaggtggccccgcgcgcccagaatacgctgcttcaggtaatagggatacggcccggagagcagccactcctcgtcgtggttgctctccagcaccatgaggtcaacgcctgccagcgtctgctcagcctccggtgtgacaaagcccgtatccgtgagtatcccgatgctcgccccgtcgtgatccacacgaaaatcgatgctctccgtggcgtcatggctggtgggaaacacggtgatccgggcgttcccgatgtcgaaagcgcctgccctcggaatgacacgcagtacatccgacacgcaggaactcttgcggcacagggcttccgccgttccacggctggcgtacagcggcaggcggtgctgctttgtcagcgtcgccacgccgcaaatgtggtccgtgtgctcgtgagtcagcaaaacgccggagatatccgctggggacagggcaagcgcctgcagggcgccgcagatccgccgcgcggagatgccggcgtccaccagaaggtgggtcccgccggcgctgaccagcaggcagtttccctccgacccactggctaagatatgtacggtcaacaacggtctatgtcctctctgaacgaaaacgcccgccgcggcaagccgcagttggctgcggcctctcgcagcgggcgctggatggcttcgtgttatcctgcgtgggtctcggtgtcagcctcatcgggcacgtccaccagggagatatccgcgcccaccgcgcggagcttgcccaccagatcctcgtagccgcgctcgatatagttgatgtggctcagctcggtggtgccctgcgccgcaagaccggcaatgaccagtgctgcgccggcgcgaagatcgcaggcctgaatgggggcacccaccagctgcttcacgccctctacaaccgccaccttgccgtccacctggatgtgtgcgcccaggcgctttagttcatccacatacttgaagcggttggcaccgtatacgccctcggtcaccaggcttgtcccctctgccagtgccagcaccgcggtgatctggggctgcatatccgtggggaagccgggatagggcagcgttttgacgttggtctttgtcagcggaccgctgcgccgcaccagcatggagtcgtcatcttctgtgacggatacgcccatctccatcagcttggcgctgatgcactccatgtgcttggggatgacgttcttcagcagcaactggccgccggtggccgccacggcggccatataggtgcccgcctcgatctggtcgggaataatgccgtaagagccgccggtcaggcgcttcacgccgcggatcttgatggaatccgtgcccgcgcccttgatgtcggcgcccatggagttcaggaagttggccagatccacgatgtgcggctccttggcggcgttttcgatcgtggtggtaccctcggccagtgccgcggccatcataatattcatggtggcccccacgctcaccacgtccagatataccggcgcacccaccagacggccgtttttggcggcggtgtggatgaagccgccctccacggacacctcagcgcccatggtggtgaagcccttgatatgctggtcaataggccggacaccgaagttgcagccgccgggcatggccacggtggcctggccgaagcggcccagcagcgcacccagcaggtagtaactggcgcggatacgccgcgccaggtcgtaggacgggcgggtggagtggatggcgtggcagtcgatctcaatggcgtgctggttcagcacgcgcacctttgcgcccagctcctccagaatagagaagaacagggtcacatcgctgatctgggggatgttctcgatacggcatacgccatccaccagcagggcggcagggatgatagctacagcggcgtttttcgcaccgctgacggtcacttcaccaaaaagctctcgtccgccgcggatcatgtatttattcaaggcagtttccctcttttcaagtcatcggtgcttgtatgcggcggcgctgtgccggcgtcaaaagcgccaaacatagtgtgtccagacagcgctcggtccatacggcgcaatacaagtgctatcagtataccatatttttcgataaaagcaagaaaaccgcaggaaatttttaagagaaccgaaaagctgcacagaaaaaagctcccgggggacggatatccgtctcccgggagcctttgccccctgcgaagcgcgctcgtgcactgtacattctcccgcgcagtgagcccccctcggcttcgtgtccccttgttgatcccccctgccgtgcggcgtacccctatgccgcagccccctgcaaggctaaatagtacgataccacttcgcaaactgtttttcaaggataattcgcgttttttagccaactttttacgctgttcaacgtctctacgccggtgtgttcagaaaagtgcaggcaataggcgcgatttgataatcgccaaaaccggtagagcacaaacccctaccgtggcaccagccagcggcgcgcgacagcgccacgcgggaagctgtgctggcacagtccttctgaccgaggaaaaaaccggaaaaatctccgtggtcgcgtgggaaaattacccgcaaggaacgtttcgccccgcgccaaggggttcttagaccgtaggtctaagcggcgtttttggctacttttgccgccgggggcaaaagtagctcgcgctcgggggcgcgaaaccctccctacgaaaatttgaggaaaaacaactccctccactttacgcaaaatccacttcattcagctaaattgtaaccgaattatgaacgggatttggccgctatcagcgccaaagaagtttacataatgacttttcgattttgactggaaaatttttccagcgaagttgttgcgttttttgaaaatctcgatttgaattgcataaatgctgcgttacacaggaattacgctttgcaggtgctcagataaattgcgtaaattactggtaaattatggaagaaatggaaattatttccaattccgggcgatttttaacggcgcgatgtcactatctcaaaaatggaaataactggcaacaaaaaccgtaaaaatttttacaacataatgatgtttacgttgtaaacggtggtccgagtgacaaagccgagtccgacacaaacaaatttttatggaggaaacaaacatgaagaagatcattgcaactgtgctggccatggtcatggctctggcactgtgcaccgtggcgttcgcagatgtgcagaagtacgatttctacgacgccacgactggtgagaaggtcgcgaatttccagggtcttgagttgacctatgtcaaggccaagaccacttccaccggcgccaacgaccccaagtctattgctcactacactgttaccgttgatggtgcgacccacagctatgtggagacctctgctgccgatgctgactacatcctgaagtatgcaggcaagagcactgtcgctatgtatgtgacttacagtgagaatggtgccatctataactacgatggcaaggtgtacgacaacttcggtaccacctgcggccagttcaagaaggatgccaacaagtactccgctgacaccaagttctacactgctgtcgttgatgacgatgacaatgtcgatctgttctatgctgacaagaacggcaccgtcactctgctggttgacggcgctctggtgaaggttaccaaggttggtactgctactcagcacctgtctgatgtcgttgttcagcacctgtgggttctggatcgcgtgaacaagaccgctaagtgcaccacttgcggcgctactgctaagctgtacgagaaggcttccgagattcccgctggtgccacctacgacaccgttgctggcggccttttcctggtcgtcgacaagaccgctaccaagcccgctgatggtaccaacaagtcccccaagacctttgacgctggtatcgctatgtacgtcggtatggctctgacctccgtcgccggctccgctgtggtcatcggcaagaaaaaggagttctaattaaactcaaaaaaagaagcaccctaccgggtgcttctttttttgcctttaattatcccaccccctggcgggggtggggtgaataaagattgcttgcccgttgggcctttctttttttgtggcacctcatccgtcacggctaaaaacttttgcgaaaaaagaggatttgaggaagttttttggtatagtatattgtcaggtttattttgcgacgcggttcggcgggggaaaggagggcttttcgtgcatttcagcgaccagtttctggacgaagtggtggcgcggaacgatatcgcggacgtggtatccggctatgtgacgctgacgcgcaagggcggaaacctgttcggcctgtgccccttccacaacgagaaaacgccctcattttccgtagcgccggacaagcagatctaccactgcttcggctgcaaaaagggcggcggcgtcatcaatttcatcatggagatcgagggcctgtcgttcccggaggcggtggagttcctggccaagcgggccaatatcccgctgccggcggaggacgaggcccgcagcaatgctgaccggctgcggcggcgtgtgctggagctgaaccggacagcggcacggtggtactatgagcagctgcagcttccccagggggcggcggtgcaggcgtatctggacaagcggcagatacggcgcggcatcgcggtgcgcttcggcatgggcgcgtcgctggaccagtgggacgcgctgctccgcgccatgacagacaagggcttcaccaagcaggagctgctggcctccgggctggtggtcaacgggaaaaacggcggactgtacgacaaattccgcaaccggctgatgctgccggtcatcgacgtgcggggcgacgtggtgggcttcggcagccgcgtgatcgacaagtcggagccgaaatacatgaacaccaccgaaacggtggcgtacagcaaacgccgggtgctctacggcctgaacctggccaaaaagaccaagcggcccaacatgatcctgtgcgagggcaacctggacgtggtgacgctgcatcaggcgggcttcgacaacgcggtggcctgcatgggcacggcgctgacccaggagcagatacgtctgctgagccgcttcaccagggagctggtgctgtgctacgacaacgatggcgcgggccagatggccacggaccgggcgctggagctgctgcagaacagcgagttcaccgtgaaggtcctgcgtctgccgcagcgattggtggatggacattatgtaaagcaggatgccgacgactttatcaaataccagggtagggacgcttttgagcagttgctttccggaagtgcaaacggcattgaattcacgatgtctgagatcgcggccaagtatgacctgaaggacgacaagggtcgcatcgcctacgcgggggagattgctgaaacattatgtaaactaaatgaccccgtggaacgggaggtatataccacccgggccgccgaggcggcgtccctgccggcggaggccatgcggatggaggtccagcgggccgccaagcgggtgcaggccaaggcacggaaggcgcaggagcgtcaggagatgaacccggtatcggccctgcagcctgcggaccgcagaatccgctatcagaatgtacgcagcgcgctggcggaggagggcgttatccgtctgctgatgcaggacgagagcctgttcccgccggaaatgccggtgcggccggaggaattttcctcaccgctgctggggcgcatctacggcgagctgtggcagcggcgggggcacgcgagcatggcggcgctggccgcggtgctgacgccggaggagatgaaccacctgacggcgctgctgcaaaaaccggaatccgcagccaacgcgccgcaggcgctggcggattacatacgcatcattcgggaagaacacaccaagcgcaccggcggcacggatccgctggcggcggcgatggagacgtataaagataaaaaaggttacggaggaaagcgaacatgaccgaagaaaagtacaccgcggagcagttggagcagatggcggaccagcttttgcaggaggccgcgccggcgcaggagaagcccgccaagggcggcctggacgaaaagaccatcgcgtccctgccggcggccgcgctgctgaacggcaacgagaagctgcgcgacctgtttaccaagggtaagaagaagggcaagctggatgccggtgagctgtccgacgtgctggacgagctggacctggagagcgagcagatggactccatctatgactctctggagcagttgggcatcgaggtaggcagcgaggatttcctggccgacctgcccgatgaggatggcgagcccgctatggatgagatcgccgagatcgaggaggaggagctggtcgaccccaacacgctggtggacagcttcaacattgacgatcccgtgcgtatgtacctgaaggagatcggcaaggtgcccctgctgaccgccgatcaggaggtggagctggccaccgttatgtccgccggccgcgaggccgaggcgcgtgtggcgcaggccgaggcggacggctcggccatccctgaggcggagatggtcgggctgaaaaagcagatcaaggccggcgagaaggccaagcagcagctggccgaggccaatctgcgtctggtggtgtccatcgccaagcgctatgtgggccgcggtatgctgttcctggacctgatccaggagggcaatctgggcctgatcaaggccgtggagaagttcgactacaccaagggctataagttctccacctacgccacctggtggattcgtcaggccatcacccgcgccatcgccgatcaggcgcgtaccatccgcatccccgtccacatggtggagaccatcaacaaggtcatccgtgtgtcccgccagctgctgcaggagctgggccacgaccccagccccgaggagatcagcgccgagatgaatatgcccgtggacaaggtccgcgagatattgaagatcgcccaggagcccgtgtcgctggagacgcccatcggcgaggaggaggacagccatctgggcgacttcatccccgacgaggccgcgtccgagcccagcgaggccgccagcttcaccctgctgaaggagcagctggtggacgtgctgggtaccctgacgccccgggaggagaaggtgctgaagctgcgcttcggtatcgaggacggccgtacccgcacgctggaagaggtaggcaaggagttcaacgtcacccgtgagcgtatccgccagatcgaggccaaggccctgcgtaagctgcggcacccctcccgcagcaagaagctcaaggacttcctgaactgaggcggaccatgaagcgggtagttctggcgctgctggcggtgctgctgctggcgccgtccctggcctggggcgacgacagccggcactatgaattccgccttgccgccaacggagaggcgacgcaccatgccgccgccggcgataccgttacggtatcgctttccctgtgccggaccaccggcacagggccgatgttcgccatgcaggacgagatatgcttcgatcctgccttcttcgcctatcagcctgatggcaccctgctccgcgagggcgtcaagacgacgctggtcacgctgcgtgatggccgtcaggcggtctacatgaattgcgtagattttggcggcggcgcggactgggcggatgagacggtcgtcggctcctttcagctgaaggtcctggccgacggcggtgcgtccgccataaccggcagccattacctggtgtccaccgaggacggcatgggccgctatgccgccgctgcccgggacgtcacggtggtggtgtcagagcagtgccgcgtgaccttccaaagtaacggcggcagcggcgtagcgccggcggaggtgctccgtggaacgcccctggcgccgccgcaggcgcccacccgctcgggctatcgcttcaccggctggtacagtgactacgacctgacccgcccctgggatttcaatgcgccggtcacggcggatatgacgctgtatgccgcctggcagcctctgccggccgccgcgccctccgccggtccgtgggcatggcttattgttggtgcttccatttcggcactgaccgttttagccctccgccgacgccgccgcagttagatcgcaaaaaggcaaaacaaaaccgcccgtccgggcggttttattttgccctgtgcgggtcagggccgttcaccgacagcgcgccccggcgcgccgcctgcaaaacaggcgaaaaattcggcgtttcagggggaagccgttgcaatacggcagtaagatgctataataaggctggtatgataggaacggaggtctcagccatgatcgagaaggaagcctttatcgcggcactgctgccgatctgcgacaccgtatgtgaatatgacaggacccggggaaagctgcgggtccggaaaaccgacctggccagtgggctggaggataaatggtacaccgtagaggagctgcgtgacatctttcgggataacggcggtgtgtcggcggagaaaagcgtgtggatgcgctatctcagcagcgaaaacctgcggagctttttctacgaaaaggagcgaaacgagagctttcgcctgcggttccggcagggcggtgtgggctgccggcagtatgacgtccgcatcgaccggatcaacgactatgtgctggtcatctccgggcgggacacccaggagcaggagatagacgcgctgaccggcgcgctgagccgcaaccattaccagcgggatatgagcaatgagatataccgcggcggtgtggcgctcatcgatatggacgatctgaagctgtataacgacataaatggccatcaggtgggcgacaacgcgctgcgggtgctggcggataccatctatgaggtagtgggccgcggcggctcgctggtgcgctacggcggcgatgagtttttgctgctgctgccgggcgtggagcaggcggcctttgccaccgtgctgggagacattcagcggcggctgcggacagtgagcataccgggctgcgagggctgccagcatatcaccatcagcgtgggctgcgtcatggcgcagcaggagacgatcgcccaggcggtgcagcgggcggaccggctgatgtaccgggccaagcgaaaaaaggacgccgtggtcaccgaggatacccccgtggaggggggagaggagatcaagccgcatattcttgtggtggacgatgcggctatgaaccgcgcgatactgcgggagatgctggcggaggatttcgacgtgctggaggcggaggacggccggcagtgtttggcgcagctggagacctacggcgcggatatctcactggtgctgctggacatggtcatgccggagctggacggcctgcaggtgctggaggagatgaataagcgggggtttatcgaggatatcccggtcattatcatcacggcggacggctcagaagaaaaggtgcggcaggcctacgacatgggcgtggcggactacatagaacggccctttgatatccgtatcgtgcggcagcgggtgataaacaccgtgaagctgtacgcgcggcagcggcggctggcggcggtgatgacgcagcagctgcggcggcaggagcacacgatgggcatcgcggcggatatcctgtcgcgggtgatgggctaccgcaacggcgagggtgcggaccatggacggcacgtggagcagatcacgcagcggctgctgcggagaatgctggaacgcacggataaatacggcctgaccctgcaggactgccggcgggccgccgcggcggctctgttccacgacatcggaaagatgggcgtaccggatgccctgctgcgaaagcccggccccctgacgccggaggagtttgacgagatcaagaagcataccctgatcggcgaggacctgatgcggggcatgaaggagatggaaagcgagccattggtgaaggctgcggcggagatctgccgctggcaccacgaacgggtggacggcagaggctatcccgacgggctgaagggtgacgagataccgatgaccgtgcaggcggtgggtctggcggacgtctatgacgcgctggtgagccagcgggtgtacaagccggcgtatacccacgcggaggcgttggccatgatacggcgcggcgagtgcggcgcgttcgatccgctgctggtagactgtctggaggacatacagggcgcactgtgccgtgaggtatacggcctgagaggtaaggaatgagcaggacaaaaagattgctggcggtactgctggcgctgtgcggcgccttgctgtgcggctgcggacagcgggagacggaaacggaagaactgccggtgctggtcattggcagcgacaactatgagccgtatttctatctggatgaggatggcgcctatgcgggtatcgacgtggagatcgcaaaagcagcctgcgagcgcttggggtggacgccggacttccggcagatatcctggcaggagaaggaccagctgcttgcggacagagaggtggactgcctgtggggcagcttctccatgaccgggcgggaggatcgctacaactgggcggggccgtatatgtacagccggcaggtggtcatcgtgcaggctgacagcgatatccgtacactggccgacctgaatgataagcgtatttccgtgcagatatccactaagccggaggaactgctgctgacacaccaggtacccggcgtagagcaggtgaaaaatgtatacagccttgccaatgtgaatgacgtgttcgctgcgctggataagggctatgtggacgcctgcgccggccacgagacggcataccgcagttttatgagcgggcgtgccggacagtatcgtgtgctggaccaggagctgctgcgggtgggcctgggcgtggcgttctataaggaggacgatacaggccgcgctgaggcattgagcgatgtgctgcgggaactgaaggaggacggcaccgctgccgggatactggaacggtacggcgtggacgcgcaggcggcgctgacggagtgacggcaatgaggaaaaagagacgatccaacaagaccatctacatcggcatagccatcgccatcgccgggctgctgtcgctgctgggtgtggcgctgatcggagcgaacagcgccatacataccgcggagcgcaccgcggagcgcacgctgcaatacctgcgtgagcagtgcatcagctatcaggatatcatcgccgcggaccgggtgaagagcctggtgcgcctgacagagcaggtgcaggagctgacggatcgcgacagactgaaggggcgggagcgcagcaatgaggggctggctgaatatgcacagcagcagcgcataagctgcgtgctggtgctgaacgatgcgctggagccggtgtattcctacggcgtggacatggactggagcgacctgtataccgatgagtcggtcagcaacgtcatgcagtatccggagaagatatttgcccggcgtttgacgcgggacggcgtggtgtacgatgtagctgcagctgcgcggacggtggagccgggcatggtgttctgtgtgcggcggcagagcagcgcggttatcgcgtcctaccacacatccatcgagagcctgctggcgggatatgagacgctgctcaacgagaagatctatacctatatcacggatggggaaaaggtcatcggcagcagtgacaacggccagtggaacctgccggtggacagtgtgccgctgatcacggcgctggagcaggcggacagcgacagctgcttgacgaggttagactgtggcggtacgtttttcggtatgcgtaggatgtaccaggagtacagcctgtatgtgttcctgccggcagactttgtgttcacgcagacaaagaatatgctgatctccgccttcggcgtgtacgcggcggcggcggtggtggtggtactgctgttggtcaggctcggccgggaccgcaaacggcgggagcttgcgtaccagaagcagttggaaaaggaagtagagcgtgccacagcggcggaccaggccaagacgcacttccttcgcagcatgagccacgatatacgcacacccatcaacatcattatgggtatgctggagatcatcgggcggaacccggaggatgtgacgctggtgcagtcctgccgggagaaggcgcagaccgcggcgcggtatctgctggcactggtaaacgacgtactgacactgaatcgcccgaagcaggagacgctgggaaagaccccctattgtttgacaagcgagctgcacgagatgttggatatttcgcgcgcccaggcggagatcgcaggcgttgcgctgacggtgatggacctgacgctggagcatgaacgattcacaggtgacccgctgtatatgcggcagatctgccagaacatcatcggcaacgccatcaaatacaaccaccccggcggatgggtgcgctgcagcttccgcgagtcccgtgatgcggatggcgtgtgccggctgaaatttgtatgcgaggacaacggcgtaggcatgagcgagacgttccagcgccatatgttcgaggcgtttgcccaggaaaacagcgataggggcagcctttccggcggcgtgggcctgggtttggccgtggtgaaaaagctggtggacgaaagaggcggtaccattcaggtggacagtgcacgcggacagggaacgcgcttccgcgtggtgctgcccatgatgcccagtgaggccgaaccggaagccgcgcttcccgatgcggcggcctccatcgccggacggcgcttgctggtggcggaggacaacgaactgaaccgggagatcgcggtctacctgctgcaggaggccggcgccgtggtggaccaggccgccgacggcaaggaggcggtggagatgttcgccgcgtcggcgcccggtacctacgacgcggtgctgatggacgtgatgatgccggagctggacggccatgccgccgcccgtgccatccgcggcatggacaggtcggacgcgcagctgccgatcatcgccatgaccgccaacctgtttgacgaggacgtggaggcctgcctggcagcgggcatggacgcgcatatccccaagccgttggaggctgggcagatgataaaaacgatcgccgagtggctggagaggaagaaacaatgaacttagagaagctttatcaagagatgggcggcgacatggcggacgccgtgcgccggttgggcagtatagctgcggtggagcgctttctgcggatgttcgccggagacgacaccttcgccatgctgcaggcggccatgagtgccggagacggccaacgggccttccgcgcggcgcacacgctgaagggcctggcagccaacctggggctggtgcagctggggcaggcagcctcagccctgacggaggccctgcgcggcagcgatatgcagcgcgcgtcggcactgtatccggagacggccgcggcataccgtcaggcgtgcgcggcgatcgaagatttagagacggatgcgtagaaaacacggatttttgccgaaaaagacttgacgaaacggaacgaaagtgatacactacaaatacgataatgttctgttggcaaatcggctgaaaggccgagacgcaaagctatggtgtctaaacggcatttgaccgcatgatcgaccggctgcaagtgggatgcacttcaaaagtgcatacattgcagccggttttttatttaccctgcccggcagggcctatattgcagtacgggtcgcggaggtctaacccctacctcggcggcatcgaaacccccatctgtcacacggcagatgggggtttcggcgttgcggaagcggtgctcacggcaaaaaaacacccccggcactgccgggggtgttcgcttatgccttgcggccgtagagcgcggtcatgcggtcgatcctgacagagagcgcatcgctcagctcgccgggcagcagccgccaggtccagttgccgccctgggtgccggggatgttcatgcggtttccctcgcccaggcccagatagtcctgcacctgcgccacgaacagctccgccacgctggacataccgccgcggataataccccagtggaagccctcctgctctgtcagcgccaggtattccaccgcgtgggccacatcctccggcgcggcctcctgccgccacagggccagggggctgttgtcgtgggtgccggtatagcagatgcagtgcggcgtataggcgtggggcagatacccgctggaatcccgggagtcaaaggcgaattccagcaccttcataccgggccagccggactcgcggagcagctgcgccacctccggggtggggtagcccagatcctcggcgatgaactccagctgcgggaaccagccgttgagccgttcgatcaggtccatgccgggaccggcgatccagcggccgtttttggcggtgggctgaccgtagggcacggcccagtagttggcaaagccgcggaagtggtcgatgcggatcacatcatacagcttgccggcgccgtcgatccggcggatccaccagccgaagccgtcgtcacgcatggcgtcccagtcgtagagggggttgccccacagctggccgtcggcggtaaagtaatccggcgggacgccggccacagccttgggcaccagatcgtcgtccagctggaagaactgcggctcagcccagacgtcggcggagtccatggccacgtagatgggcagatcgccgatgatgcggatgccctgctggtggacgtagtcgcgcagagcggtccactgcctgaaaaacagaaattgcagataggtgaagaactgcacatcctcccgcagaagtgtgcggtacttgtccagcacggcctcgttcttacgcaggcgaaggtcgtcgtcgggccactccgtccatgccttcatgccgaagtgccgcttgcaggccatgtacagggcgtagtccggcagccagcgcgcattgtcctgcgcaaaggccgctacggcctccgcgtcccgctcccagccccgctgataggccttgcgaagaagggtaaagcggctctcgtagatctttccgtagtccacatggcgcgggtcgctgccccagtcgggggcggcgcactcggcggccgtcagcagcccgtcggccgccagcatatccgggtcgataaaataggggttgccggcgtaggcggaaaagctttggtagggggagtcgccatagctggtggggcccagggggagcatttgccagtaggactggccggcgtctttcaggaaatcggcgaaatcataggccgccttgcccagggtaccgatcccgtagggggagggcagggaggataccgccattaaaataccgctgcttcgtttcataactcaacttctctcttggataggatttgactttcagccggacggtcccggccaaaatatacgggggcgggcgatcagcccgcccccggcgtgttgtaagtttagcccttgacggcgcctgccgccacgcccttgatgatgtgcttctggcagcagagatagaagatgatgaccgggacgatgctcagcaggatcagcgccatggtggcgcccatatccacctgtccgtagctgcccttcagatactggatgacgatggggatggtgcggtatttgttcagatccagcaccaggtacggcagcagaaagtcgttccacacccacatgatctccagcacgcccacggagataaacgtgggcttcagcatgggcagcaccaccaggaagaaggtacgcacaggcccacagccgtcaatggcagcagcctcctcgatctccagcgggatcgtcttgacaaacccggagaacatgaacaccgccagtcccgcgccgaagcccaggtatacgataggtattgtccacggtgtgttcaatccgatcttggcaaaagccatagaggtgaggctgaagtagggaagcttgacctgctcggcggtgcgggacagggtgaacatcaccatctggaacggcaccaccatggagaacacgcacaggtagtacacgatcttgctgaacagactgcccacacgggccacataccacgcggccatagaggtgcagatcaggatcagcgccgaggagaccagggtgatgaacagactgtagaacaccgccttgataaacggatagttgccgaaggtcatgcccttgatatagttctgccagcccacgaaggtgtcctcattgggcagggcgaacgtatcggtattgacagcggcattggtcttgaaggagttgatcagaacgatgacgatgggcagcacatacacgatgcagatcaccgtgaacgctatggtcaacaccattttgctgcggtcatgctttttggcaaggctcgtctgcattactgctgcacctcctttttgcgggtagcccgaagttggatcagtccgatagccgccaccagtatgaagaacagcacggctttggcctgggccacgccgcggttgttgccgctgccggagtagaaagagttgtagatgttcagggccagcatttccgtggtcttgataacgctgccgtccgcctgctgcaggaaggggcggccgccggtcagggccaggttctggtcaaacagcttgaagccgttggtcagcgtcaggaaaatgcagatggtgaaggagctcatcatgttggggatagtgaccttccacagggtctgccagttggtggcgccgtcgatgcgggccgcctccagcatatcctccggcacggattgcagtccggcgatgtagatgatcatcatatagcccacctgctgccagcagatcaggatgatgagaccccagaagccgaagtggctgttcagcaccacggacttgccgtaggccaccagaaagccgtcgaagatcatggaccagatgtagcccagcacgatgccgccgatcaggttcggcatgaagaacaccgtccggaacagattggagcccttgatgccccgcgtcagcgcataggccaccgcgaaggccagcgcgttgatgaacagcaccgacacaaaggcaaacagcgccgtgaacaagaaggcatggcggaagctgctgtcggcaaaggccttcagatagttgtcaaagcctacccatgtccacttgctggtcagcttgaatttgcagaaggacaggaacgcgcccttcaggaacgggtagatgaacccgatgcagaaggcggcaaaggtgggcagcagaaacagccacaccatgcgctgaattggccgtcggaccagtcggctgttcagcgcagccgcgtcccgtttcgcttgaaatcgtttcattagaccactcctgttctccgtagttttgtcacagcgaaagctctcctccgaagtgcgttcgaaggacagcgcacgccgtcacagagtaagaaagagggggcgggcgaaaagcccgccccctgtgcgtatgtggttgaaaccgtagcttagccgttggcgatctcgttgttgtactgggtagcccagccttccacgaaggcggtcttcacatcgtcccagctgccgccgtcggcggtatacttgcccagagcgtcgaccacagcggcacgccagtcattgacggcgggggtgtagttgaaggcccaggtgacaggatagcagccattggcaacatactcgttggccagagcgctgaacggattggagggagccttggaggcctggaacgggcaggcgccgaactgctcagccatcatggcagtgccttcctcggaggtaacgacccagttcaggaagtccagagtggccttgatgtcctcctcggaggcgttcttgttgacggaccagtagttctcggtaccggtgcacaggccggccttctcctcgccctcaataccgcagtagatggggatcatggtcaggtcgtcagcgttcatgccgaacttctcgccggtcaggttgctgtactcccaggtgccgttctgatagaacacagccttgccctcgccgaactcggcctcagcctggtcgccggtggcggtcagcagggcggcgccggtggtggcggagtcagtgatgtacagatcccagatagccttgtagttgtccagataagtgcccttgatggtggcgggcttgctggtcacgccttcatcgcggaactcatagaacagaggcatattggccagatggccggagaaacgccaagaggaggtgccgtccagaccggcggaggtgaaggcgtcgaagcccagctcggcagcgcggctgtggatgtcgtcagcgatcttcttcagggactcgaagttggtgatgtcggtgacctcatagccggcttccttcagcagcgccttgttcacgatgataccgtaggtctccaggcagtagccgatggagatgacctcaccgtcggcgttcttcagggcatagtccttggaggtcagctggttgtacacgtcgctgctgctcaggtcgtagcagaactcaccccaggtagccacgccgccctcgttgcactggaacagggtgggcgcgtcttccttgtccatctcggacaccagggtggactcatactcgccggaggcggcggtgaggatcttgacgggcacgccggtcttctcggtgtaggtggcggccagagccttccaggcgtcgtcagactcaggcttaaagttcaggtagtacacgctgccggtggcggtgtcgccgccctcggtcttggtgtcgtccttcttctcaccgcaggccaccagagacagggccatcacgagagcaagaagcattgcaagaaacttcttcatggtaattactccttttttgtttttattttcacatcacaaggatgtaaaaaacagatcattagggtacaaaaaacaaattattgggatgcaggaaacggatccttaggatacacaaaatagatcacaaagatatacaaaagtatcatccgggcgcggccacgctgcggccctggcgcagggtggtgggaagcagctcacaggcgtgggagcccttgtgccgcaccatgtccagcaaaatctcggcgctgcgccggcccatttcctccataggctggcacagggtagtaagcggcggctcaatataggcagacaattctaacccgtctatcgctataacggaacagtcctcggggatacgcctgccggcatccatcaaggcccgcatggcaccaatggccatagagtccgcgatggcaaatagagcagtaaaatccgcgccccgttccagggcagcctttacggcggaataggcatcgcggacgtcgaagccgccggtggagatcaccagctccgggtccacggggatgccgtgactctccagcgcctgcacatagccctcataacgcagctggctgatggactgatcgttgggacgggagatcagcgcggcgatgcgccggtgcccgtggcggtacaactcctccactgcctgctgtgcggtgtcaccgtcggcgatggacacagaggaatactcgccctcgatcagcgtgccatagcggttggagtaggaacagcacacaaagggaacgttcagcatcgccagatcagcgggggtgtaatcaaaccgaccgcccaggaacacgatgccctgcaggcgcttttcgcgctccatgaccgcaccgcatttgacctcgtcgtcacaggcgccgatctgctgcatgaccattgtaaaaccggcatcggtgatggtgcgttcaatggcgcggataatgtcggtgtagaacggattggacacaccgcggactaccagacccacagcgtcggacttggtgcgtaccagatcgcgggcactgttgttgggaatgtagttgctattcttgatagcggaaagcaccttacgccggacatcctcactgacatccggccggtcattcagcacacgggagacggtactgacgctgacgctgcactgtttggctatatccttgatcgtcatacctgggtgtgcctcctactataccagatcgaaaggaacgaaaatcgtcagaggaaagcgaaaacatttccggtaacgtttccgttcagcatagttatcctatcagtgtttgccgcaattgtcaattgcttcgctgcatttttgccgaaacgcacagaaaagacggtggttttcttgtgaaaatcacaagaaaaccgccgtccgattgaacgggcggcggcgaagtatcgaatgtacggcgcaaaatggctgaattaccggcgaaggagggcgcggcgcgccctccagtcgggcagataggcttccacctcgcggtagaaggcgggggagtggtcgtggtggcgaatgtgcgccagctcatgaaccaccacgtattcaatggcggtttcgggataggccatcaggtagagggagaagctgagacggtttttgccggagcagctgccgaagcgggtgcgggcggcggtgatggtgatgccggcgggctgcacgcccatgcgctgggcccagtgggccaccagtggcggcagtgtctcttttgcctgctgccgccatgcatccgtctgtgccgcagacggctccgggtgggcggccagaaaggcctgccttgcggcaaggtgcttttccagccagctgcggtggttgtctataaagcgggcgatgtccgcatcggaggcccgcagaggggcgcggaccagggcggtgccctgccgggtgacctccagcgccagggtgcgccggtgggagcgtatcacagtatagtcgatcattggctgtcctccgggatgaaacgcgggccgtggtagccgtcacggtccacgatctcggaccacatggcggcggggcgcacccacagaccgccattatcatacagggcacggtagaccaccagttcctccagtgtttcagagtggcgggcggtgccgatgacctcatattcattacccttaaagtggcggtagcggcctggttttatagttgacatactatatactctcctgacaggtaacagttgtgttgatgatacaaatagtatatactattggcagtgatttgtaaatcggaggtgcaaagatgaaaaacaccacgctgtgctatatcgaaaacgaacggggcgaatacctgatgctgcatcgggtgaagaagcagaacgacctgaaccacgacaagtggatcggcgtgggcggcaagtgcgaggagggcgagagcccggaggagtgcgtttgccgcgagacgctggaggagacgggcctgaccctgaccgactatcggtaccggggcgtcattaccttcgtgtcggatatctgggagggggaatatatgcacctgtttaccgccaccggctggacagggacgctgcgggagtgcagcgagggcgtgctggaatggctgcacaaggatgcgctggcggcgctgccccaatggacgggggacaagctgtttctggcgctgatccacgagccggacacgccgtttttctccatgaagctgcaatacgtgggcgatacgctggtgtatgccgctctgaacggaaaggagctggcggtatgatcctggtgagcgcgtgtctgctgggctgtgcctgtcgctacgacgggcagagcaagcccaacccgctggcacaggagctggcgaagcgcggcttggcggtgccggtgtgtccggagcagctgggaggattgcccacgccccgaaagccctccgagcggcggggcgatcgggtggtgatgagcgatggccgggacgtgacggcggaataccgccggggcgcggaggagacgctgcgtctggcgcggctgtacggctgtaccgccgccgtgctgaaggagcgaagcccctcctgcggctgcgggcgcatctatgacggaacgttcaccggcacgctgacggacggcgacggcgtcacggcggcgctgctgaaggaaaacggcataaaagtgtacggcgagagcgaattggaaaagctgctgtgagccgcctctcccattttattttccgccaaaggcgcacaaattttggatttacatttggcggaaaagcaggtatactatgaccaacagcgttgatatgtgcggcgacgggagctcccgtcattccgtgggtacccacggaatgatgccgcctgtatgctatgggagaataaaaggaggagtgtacaatgaagaagcgcgtagtgggtctattttttgcattggtgctgtgtttggcgatggtgcccatttctgcttttgcggcgggaaagacagccattagaactgttgatgagcttttgcagtttgcaaaagcggtggacaatggcgaatatgatggcaagaaagatgctgttgtatcgcttgaagaagatttggatttaacagatattgcgtggacaccaattggcagcgtttttgacggcaacggaaatctgcaacattacttcagcggtaagttttacggaaacgggcatacaatttccaatttggatttttccgaaaactatggaaagacagagtatccgtccttcggatttttcagtgaggtttacggcgctgaaatttccggtttgacaattcaaggcaagctggatgtgtccaattcagggtatgtctattttggaacggtagcgggcgttgcagcaggcagtaaaattactgactgcgtctcagatgtgtcgttcacggatacagacaaatatattaacggtactgtggccttgtgcggatatgcgatagatagcacaattgaatactgccaaaacgaggggaatttttcagtaatgaaggacacctcccgattttggaagggcggtatcgtgggtcttgcggaaaacagtaccgtacagtattgcgctaatacaggcgatatgacctcttggacaccccataccggcggaattgttgggcagttgtatcaagactcaaagatcatcaattgttattccacagggaaaatggttcctcttggcagtggaactacagatttcggcggcattgcaggcacagttggtgcaggtacagaaatcagacattgctatttcgccggtggaatggatctatctcaatatactgccactacaccttataagcgtttaggcggtattgcaggcgatgtttcttctgatacacctgtttttaaaaacaattatttcgtggaagcgggaaatgttacggcttgctttaaataccaagatgctgggacagaaaagacccttgaatacatgaaaacggaagatttctttaaggaaatcactgctgccggcggcaagtatcgatttaacccaaatggcacaccgcttctgccggagcacaagtatccgacagcagaggaaacgccgcgttactactacagctctgcgactaccgcgaaggacgagggcaagaccggctcccccaagaccatagatgcgggcgtgggaatgtacgccgtgagtgcggtgctgtctctgaccgggatggtctacgtgggtaagaagaaaccttgagaacgcaaaaaagaaatcccgaaagggatttcttttttgtcgggggacggagccccacgccagcgtgagcgctggctcgcaatgacacctcatccgtcaacgcttcgcgttgccaccttcccctcaaggggaaggtttcgggcggacagagtcgtccgcccctacaacggtttaccgggagcctatgcaaaaagaaaacggattgccgcgtcgggcttcgccctcctcgcaatgacagaaagcggcgggtgggcgcgcaatgacaatggcgcagaaaaaaggaagcccggagggcttccttttttgtgtctgttgttaccactccagattcttttccgtctccttgctgaacacatgggccacattgccgccgaagatcatgttgacctcgctgcccatggggaagtgggcggcgttgccgttggtggggacgatgaccaccacgtcatggtcgtgggtggagatatgcagatgcacagaggagcccatcagctcgctgacatccacggtacccttgacgccgtcggcgcagagcatgatgtgatcggggcgaacgcccagcgtcacgtcctgttccggtacatttttagcgctgagccgggcctgcttatcctcggccagttccacgttgatgccgtcgatagccacggcgtatttgccgtcgctgttcttcaccagcttcgcgtcaaagaggttcatctggggcgtgccgataaagccagccacgaacagattggccgggtggtcaaagacctcctggggcgtgccgatctgctggatgaagccatccttcatgatgacgatgcggtcgcccagggtcatggcctcggtctggtcatgggtgacgtagataaacgtggtgttgatccgctggcgcagcttgatgatctcggcgcgcatctggttgcggagcttggcgtccaggttggacaggggctcgtccatcaggaacacggcggggtcgcggacaatggcgcggccgatggccacacgctggcgctggccgccggacagggccttgggcttgcggtccagatactgggtgatgtccagaatttctgccgcctgacggaccttcttatcgatctcgtccttggggactttcttcagcttcagggagaaggccatgttttcgtacacggtcatgtgggggtacagggcgtagttctggaacaccatggcgatgtcccgatccttgggctccacgtcgttcatcagcttgtcgccgatccacagctcgccggaggtgatatcctccaaaccggcgatcatacgcagggtggtggacttgccgcagccggaggggcccaccagcacgatgaactccttgtcggcgatctccagactgaactgctggacagccacaacgccctcgtcggtgatctgaagattgctcttcttttcctggggctcctcgcccttcttgaccttctttttcttctcggtgttggggtagaccttcttcaggtccttcagaatgacctttgccatacatttttgactgtaaccgtcctgcctccgcaaaagacggcctcgcacgggcattgccctcagtgccttacgacaggtctccacactgccgcaccgccagccacagcgggtattcctccttatcttttgccgtcaggcggcatgaagtggagtgccgcctgacggtgggaatacggtaagtataaccgaaaacgtttccaagcgcaagggctttttgtgatatatatgaaaaaatactgcctgctgggaagggcaggcagtatttctcacaaatcaacgataacaggcgtgtggtcggtgtggggcagcagcttttccagcacgtcggcggtcttcagcttcagtgtactggtgcagatgcacgggtggcaggagaaaaagggcgcgtcatagacttcgcggtcgatgagcagctggacccggtgctccgtatcgttggccaggcccagaatggtggcggagcccgggtggcagcgcagcagctcccacaagatctcctccggggcgaagctcaggcgggaggagttgatctgtgcgctgaggtccttagtgtggaagggcttgtccggcggcatgcacagcagatagaacgcggttttctgccggttgcacagaaacaggttcttgcatacggacacgtccagtacgcggctgacctcggcgcacagctccatgttgaaggcggcgtcatggctgacgcggtcgtattcgatgcccagcttgtccagcaggtcgaaggctgcggcctcctgtggcagcagctggccttccggacgggtgttatgggatacgggggagatggtcactgtgcgtcacctcgtttcagcagcagctctccggcgcggtagatgtcgcctgcgcccacggtgataatcatatcgccgggctgggccagcttttccagctcgtccgccgtctgctccagcgtggcgcagtagacggcgccggggatgcgggcggtcaggtcccgggaggagatgccgatgtcgttcttttcccgggcggcgtagatctccgccagcactacgcggtccggcaggcgcagtacctccacaaagtcgtcgaacagcgcggcggtgcgggtgtaggtgtggggctggaaggccaggatgagccgtttgtggggcagcgcctgcgcggcgctcagcagcgcccgcacctcgtcgggatggtgggcatagtcgtcatagacctccgcgccgcggaaggtgcccttgtgctcaaagcgccgtccggcgccggtgaaggacgccaggcctgccgttaccgcctcgccgggaaggccgagaacataggcggcgctggccgccgccagggcgttggaaatattgtgggcgccggggacgtgcagggacacatgggcgtaggtcaggccgttgatgaccacgtcgaagtcgccgtagccgtcaaagaaagagacgttgtcggcatagcagtcggcgctacggtctttgacactgaaggtgaacaccggatgcgtcaggcccttgacggcctcgcgggcaccctcgtcatcggcgttggcgatgataaagccgcgctccggcaccagggcggcaaagtcgtggaaggagtgctcgatatcggccaggtccttgaagaagtccagatgatcggcgtggacgttaaggatcactgccacggtgggaaagaagttcaggaaggaattgcagtattcacagctctccagaatgatggtgtcgcccctgcccacccgatagccggagtgcagcagcggcagcgtgccgccgatcatcaccgtggggtctgcctgggccgccatgaagatgtgggtggccatggaggtggtggtggtcttcccgtgggttccggagacgcacagggcgttgcgatagccctgcatgatggcgccccaggcctgggcgcgctcgtaaaccgggatgccccgggccacggcgccggcgatctcgggattgctgtcgtgaatggcggcggtacggatgaccgcgtcgcagtttttcaggttctccgccgagtggccgatggccacggggatccccacagagcgcaggtgcttcaccgtgtcgctctcgctcatgtccgagccctgcaccgtcacgcccatgccctgcaatacctccgccagcgcgcacatactcacgccgccgatgcccgccaggtgtacgcgcttgccggggtggatatacttgtgaaagtcctcagtaggatgaaacatatttgctgcctccttgacaggaacagaaaaattactgtactattataatacaacgactccgcccatgcaaccggcttttttgccggtatttggcggcggaggatgaaaaaacgtgaggggaggcgaagccatgctgccgcaggcggtgcaatatgtgctggaacggctggaggctgcgggcttcgccgcctatgccgtgggcggctgcgtgcgggacacgctgctgggccgcacgccgggagattgggacgtgaccaccgccgcgcggccggagcaggtgcttacactgtttgacggctatgccatcccaaccgggctgaagcacgggacggtcacggtccgggcgggggagatgcacattgaagtgaccaccttccgggcggatgggacctatacggaccatcgccggccggatcaggtgtttttctccgacaggctggaggaggatctctgccgccgtgacctgacggtgaatgccatggcgatggacctgcgcgggcatatcaccgatctgtatggcgggcgggaggatctggaggcgggtatcctgcggtgtgtgggagagccggaacgacgctttgaggaggatgcgctgcgtatcctgcggacgctgcgctttgccgccgtactgggattttcggtcgagccgcggaccgatgcggcgctgcgggtgaaggcgccgctgctgcgctgtatcgcgccggagcgtatcctgacagagatggataaactgctgtgcggcagtcacgtgctgccggtgctgttgaactggccggacgtgctggcgatgttcctgccggagatcgcgccctgcgtgggcttcgagcagcacaatcgccatcatatctacgacgtgtgggggcacagcgcccacgcagtggccgccgtcccggcggaggtggtcctgcgctggactatgctgctccatgatatcggcaagccggcgtgctttacccgggacgagcagggcgtggggcatttttatggtcactcggccatctcggcggacctggcggcggatatctgccgccgtctgcggatggacaaccgtaccgccgaacgcatcgtgacactggtgcgctggcacgaccgggatattgcccggacggagaaggctattgcccgcgccgtgtcgcagctgggagaggagacgtttcggcagctgctggaggtgaagcgggccgacaacgccgcccaaagcccggaagatcgctgccgtctggcggatatacagcaggcggaggaccttctgaacacgctgctggcgaagcggcagtgcttttcactgaaggacctgacggtgaagggcggcgacctgatggcactggggctgcgggggcgagaggtcggtgatgcgctgcagtatctgctgaacgccgtgctggatggaacgcctaacgataaagagaccctgctgaagctggcggcggagagaaaatagccccgcggcgctttctgcgggaaggaggtataaacttcgactccccggaggcaagacagcaaaagagaaagataccaaaaggtatctttctcttttggtgcctcgtcggggattcgaaccccggacaccctgcttaaaaggcaggtgctctacctactgagctaacgaagcatatgcagttatcgtaaggacggtgtcgtccggaaagaactggcagggatggctggactcgaaccagcggatgagggagtcaaagtcccttgccttaccacttggcgacacccctgtgtggaaagggatgagggaccgggacactcccgatccctcatttctttttgtggggtgggtaaagggactcgaaccctcgacacccggaaccacaatccggtgctctaaccaactgagctacacccaccatatacatccgcacgggaagcgctgacgcccgcaaggggaaatggcacgccagaagggactcgaacccctggcctactgcttagaaggcagttgctctatccaactgagctactggcgcgtatctgtcaagttggagcgggtgacgggaatcgaacccgcatccccagcttggaaggctggtgccctggccattgtgctacacccgcgtgcgccctccactcaaatcgtcagcttgtacatattaccataggccaccgtccgtgtcaagaaaaaaatcggagaacggggcacttttccgtggaaacagccttgtctacgctccgtagacaaagtcagcgggtgggggatggacaaaaatccgccgtatgctatactgggtacaacaagaaaaaaggaggccgcgacaatggatatggaaaagacaggcacctatctggcatcactccgcagggggcgggacatgacacagcagcaggtggcggatatattaggtgtgtccaacaaaactgtcagcaaatgggagtccggcgcggggctgccggacattgccgccctgccggcgctggcggcgctgtacggcgtgacggcggacgacatcctggccggtgagacgcgcccccgagcctgtgccgatacaccagcggaggtggaggcctatctggagcgccggggaagcctgcgcttccgcatcgggtacagtctggcagtaatggcgttggcagtgtgggtggcattcccttataacaactggtcgtggctgtgcctgctggcgtcgcccctgtgcctgtggctgggctggggcgtgtgccgcagccgagagacgctgcgtcgccgcatcctgctgctgataccgctgtgcgccctgtggctgttcgcggccatacagctgctgggggtgtggcgcctactggtgtccgcctatgcgctgcacggcggtgtggtgcggcagttttcctgggcagcgctgactgtacggcaggaggcggtatggctgctgctgccgctgctgctggcggcggcgctggtagtcggcggcgcggtgctgaaagagccgctggtgcgggataggggcttccgttttgcactgtatggcggctgcggactgctctttgccgtggagatcgtgcggatcatggtgtgttgggcgccggccgctgcctatgcggccacggtcagtacggcggaaagcgttatgatcagccgctatgcagacctgtccgcggtggcctggcccttggagacggtgcgttggatcgtcctggcggcggtggtagcggcctggctggtgtggggcatgcaggcatatcggcgcgcaaagaaaaattaaacttgcctaacctacgggattggtggtatactatacacgggtcatcttatggcccgtgtattttctgacaggaggaagacctatgatctccacgaaaggtcgctattccatccgcgttctgctggatctggcggagcaccgcagcggggactttatacccatgaaggaggtggccgcgcggcaggacatctccctgaaatacatcgaacggcttatgcctgcgctgaagtccgccggcctggtggagagcgtccacggcatcggcggaggctaccgtctgacgcgagagccggaggactacaccctctgggagatactggagctggcggagggcgatctggcaccggtcacctgcctgcagccggacgcgccggtgtgccagcgggccggggagtgccggacgctgggcgtgtggcagggatactacaagctgacgcgggactacttcacccacatcacgctggcggatctgatgaacgccccggcgggggacaactacgtgatatgagcaaaaaaagagaccgcagggcggtctcttttttgcgtttcgcggtcagggctggtaggtgagggtgaaggtgtcgtcagcggcgctatcggtgtgctggtgtccctccagcgtgacggaggccacggcgtccacgtccaccagacggtcaaacacgtaggtgttgtcggcgaaggggacgtcgtcgctgccgcgcatacagcccaccacccagttcatcaggctgcggctgctgctctccacggtgaactcactgccgtcctgatagcggagggtcagctcgtccacaaggggctcgcggtcgggatgggcgttgcggatgctcatgcccagcggggagagagtcagggtctcgctgccggaggtcagggtggcgacgggcacgtaggtgcggggctgcacggcgatggagtagggctgccccagctcgtcctgcatagtgacgtacagcaggtcgccctgccggaaggacgtgtcggcggcgaagtacagcaccacgttcaggcaggtgtcggtgctggtccccttgtccacgtagcacttggcgaacagggcattgccctcgtcggggctgcggaagtacagggtgggctggaggggcaggtcgatgccctcgccgtagcccacgtctgtgtagccgacgccggagggattctccacggagtaggtcagcaggcccaggccgttctcgtcgatcaggaaggtacccagcttgatggtattgccgtccacggtcatctccgcgtccagcttgctgaggtactggcccaccagacgctgggtggtctggacgtcaccggggatgcgctccatatccgggacagggacaaggccgcccttgccgtcgtccaccacaggggcggcagcgtcgatgtcatcagtgaaggcgtggtgggtggcgtcgtccacatggtcggcgggggatacatctgccttgataagggtcacaataccgctggccacagccacggtcagcgtcagcgcggcggcaatggcgatcacagcgcccttgcccagtgcgcggcgggtctttttctcgttctgcatggtttttcttacctccgtcagtgtgtccggggaggcgtgcagcggggaaaaggctttttcaaataattctctgtcatgcatactgcggcacctccgataaaatgtgcttcagcttgtctctggcgcgagacagccttgtgcgtaccgtttcctccggtacgcccagcaaagcggcgatctccctctggcgatagccttcgtagtagtacagcagcaccggcaggcggtagcgcctgtccagcgacatcaccgcatcgaacagctcccggcactccggggcctcgaaggtgaggctgttctcgtagtcggcgatgtcctccgccttgtgccacggggcgcggagcacgttcttgcagcgattgaccgtgacgcgaatgagccaattcttgacgtgggcgtcgctttcgaacgccttatcctctttgtacagctgtatcagcacgtcctgggtcacatcgtcggcgtcgtcccggcagcgcagatagctgtacgccacccggaacaccgtgtccatataccgctccgccagcggggtgaactgttcgtccgtcataggggttctccttttgttgaggtgaaaggcctttcatctatcatacacctgcggagcaaaaaacgtttcaaaaaagcagaaaaaatgtagaaagaaaatagaaggagaatagaaagaaagtggaaagaaacagaagaaaagacgaacggacctcaaaaaaggtccgttcgtcatgtttgtgaggagaaaatggaaggaagaaaaacgcagtatcagtccgcaaacagcggggtggagagatagcggtcgccggtgtcgggcagcaggaccacgatggtcttgccggcgttctccggacgcttggccagctcgatggcggcccacagtgccgcaccggaggagatacccaccagcacgccctcgcggtgacccatttccttgcctacggcaaaggcgtcgtcgttgtccacagggatgatctcgtcgtagatcttagtgtccagcacatcagggacgaagcccgcgccgatgccctggatcttgtgggagccggcgataccggtggacagcacggcggaggtcttgggctccacggcgactaccttgacggcggggttcttttccttcaggaacttaccggtgccggtgatggtaccgccggtgcccacgccggccacgaagaagtccaccttgccgtcggtgtcggcccagatctcgggaccggtggtctcgtagtgggccgtggggttggcgggattcacaaactggcctgccacgaagctgttagggatctccttggccagctcgtcggccttggcaatggcacccttcatgcccttggcaccctcggtgagcaccaactccgcgccgtaggccttcatcagctggcggcgctccacggacatggtctcgggcataacgatgatgatgcggtagccccgggcggcggccacggaggccaggccgataccggtgttgccggaggtgggttcaatgatgacgctgccggccttcagcaggcccttggcctcggcgtcgtcgatcatggccttggcgatacggtccttgacgctgccggcggggttgaagtactccagcttggcgacgatcttcgccttgaggtcatgggccttttcgatatgggtcagctccagcaggggagtcttgccgatcagctggtcagcggaagtgtagatgttagacatagtgtttatctcctttatcgtttatagtcagatgttgttgtgtggaatgaagggaaaaggagtcaacatcgtccggtcaggagaacaagagtgcgggtcatgtgatcgcctcatttctgaaatacaactaccaactcggtaggttggtacagttataacacggcggcgcggatttgtcaaccctgtttttgaaaaaaatccggtaagcgaatgtgacaatattgaaagagtaagagggcttgcgggacagaggcgagggagggtataatgaagagcgtaaaggatgtgagcgtatgtaccgtatatttattgtggaggacgacaggaccatcgcccaggcggtggcgcatctggcggagagctggggactggaggtccggtgcgcccgggactttcggacggtgacggcggaggcggcggaatttcagccgcacctcattatattggatatcgccctgccgtgctttgacggctatcactggtgccgggagctgcggaagcagaccagtgcgcccatcctgtttttgtcctcggccggtgataacatgaatgtcatcatggccatgaacttcggcgcggacgattttatcgccaagccctttgacggcggtgttctgatggccaaggtacaggccatgctgcggcgcagctatgacatggcggcgccggcggtgctgcgggagagacggggcgcgcagctgtccgccgacgaccagaagctgacctatcaggggcagacggtggagctgaccaagaatgagtaccgtatcctgtcctgcctgatggagagcgccgggaaggtggtcagccgggagaagctgatgcagcggctgtgggagacggacagctttgtggatgagaacacgctgaccgtcaatgtgaaccgcctgcggcggaagctggcgggcgtggggcttgtggaatttatcgccacccggcacggggtggggtacatcgtggagtgagagatatggagctgctcaaagcatatctgaaggagcgtcggctgacgctggcggcatttctgctgtttgtcggggtgtttgccgtgtcctttgccctgtacggcctgccgctggcggcggtgggctatccggcagggctgtgcgttctgctgggggcgtgccttgcggcgtgggattacggccgcgcggcacggcggcacaaggcgctgaagcgtctgcgggaggcgggcgaggcggtgctgctggacctgccggccatgaccaccgtagagggggcggactgcgccgccgtggtggagacgctgcggcgggagctgcgccggcaggagacggcgcgcgccgcccggtgggaggatatgacggcctattacaccgcatgggtgcaccagatcaagacgcccatcgccgccatgcgcctgaccctgcagggtgaggacaccccggccgcccggcggctgatgacggagctgggccgggtggagcagtatgtggatatggcactgacctatctgcggctggaggagggcggcagcgactacgtgatacgaacgtgcgccgtggatgatgtggtgcgcgccgctgtgcggcggtttgccggggagttcattgaccggcgcatcgcgctggattacacgccggtggaatgggagacggtgacggacggcaagtggctgacctttgtggtggagcagctgctgagcaatgccctgaagtacaccgggcaggacgggaccgtccggatctaccgggagggagacgatctgtgcatccgggacagcggcatgggaatcgcgccggaggacctgccccgggtatttgacatgggctataccgggcagaacgggcggctggaccggcggtccagcggcatcgggctgtacctgtgccggcggatatgccgcaatctgcggcatgagatacggatcgagtccgtgcccggcgtgggtaccacggtgaggctgacgctgggccgcccggcgtttgtggcggagtgaggggagtgggtggacagagtcatccacccctacaatggttcaccgggaggttctgcaaacgggccgtcgaggacgccggcccctacgacattttattatcgcccttgcaaagggtgggaaatgtgacaattgtgttcgggaagggtaagggaaagcgatggaaggggggcgggggacgcggtatactgaccgtgttgggagacggggcgatgggccggaggctcccgaaggaaaaggaggtcatgctatgagcattttggaagtcagtgggctgcggaaggtatacacctcgcggctgggcggcagccgtgtagaggcgctgcggaatgtcagcttcaccgtggagcagggcgagtatgtcgctatcatgggtgagtccggcagcggcaagaccacgctgctgaacattctggcggcgctggacgagcccacggcgggtacggtgcggctggacggccatgagctgggcaagatacgggagagggacgcggcggccttccgccgggacaacctggggttcgtgttccaggagttcaatctgctggacacatttacgctggaggacaatatctatctgccgctggtgctgatgggaatgtcttacgaggatatgcgggcgcggctgctgcctattgcccgggagctgggactgacggagcttttgaagaagtacccctatgaggtctccggcgggcagaagcagcgggcggcagtggcccgggccatcatcaccgagccaaagctgctgctggcggatgagcctaccggcgcactggacagcggctccaccgacgagctgctgcggctgttcgccgccatcaaccgggcagggcagaccatactgatggtgacacactccgtgaaggccgccagccgggcgggccgggtgctgttcatcaaggacggccaggtgttccaccagctgtaccggggcgaggacgacgacacccggttctatcagcgcatctccgacacgctgactatgctgcagtcgggcggtgaaccggcatgagggaaaagacattatacgcccggctggcctggacgggcatgagaaaaaacaggcggctatacctgccgtatctgctcagctgcgccgggatggtgctgatgttctacattcttacggggctgtccggatcgccggtgctggagcacatgtccggcggcggcagcagcgccatcatactgcggctgggcacggtggtcatcgccgtgtttgcgctgatatttttgttctatacccactcgttcctcattcgccgccgggagagggagtttggcctgtacaatgtgctgggtatgggcaagggcaacatcgcccgcattctgctgtgggagacggtcatcacctatggcctgaccacggggacgggactgcttctgggcgtggtactgtataagctggcggagctgggtatggtgcggcttttgcaggtgcccgtgacctataccctgacggtgtccgtatcgtctctgctggctgcggcggcgttgtttgcggtcatccacacgctgatattgctgaacagcctgcggcagctgcacggcgtcagtgccgtggcgctgctgcgcagcgagagcgtgggcgagaagccgcccaaggcgcagtgggtgctgacggcggcgggcatggttctgctgggtgccgcttacgcgctggcattgtccatcaaggagccgctggcggcgctgctgtggttctttgcggcggtcatcatggtgatactggccacctatctgctgtttatcagcgggtcggtgacgctgtgccgcggcttgcaaaggaacaaaaaatactactaccgtccccagcacttcgtgtccgtgtcctccatggcctaccgcatgaagcgcaacggcgcggggctggcttcggtgtgcatcctggccaccatggtgctggtgatgatctcgtccaccacctgcctgtatgtggggcaggaggacgcggtgaatgcccggtatccccgcgacatggacgtggcggtatacggcagaagcgatcatccgctggacgaggcggaggcggagcagctgcgtcagggtgtggagagcaccgttttcaacttcggcgggcagaccagtaatgtggcgacataccgtgagatcagcgtcagcggtctgccagacggcggggatctgcggttgggcaacgccggtgcgtccgcagcggacagcacccgtgtgacgcagctgcatttcctgccgctggaggactacaacgccgccacggggcagagcctgacgctggaggacgggcaggtgtatgtggcggctctgcggacggattttccttacgacaccctgaccgtcgatggggaatggacgttccgggtcatggatcgggacattccgccgctgagcggccccttcacggcggatatcaccccgaccctgatggtggtcatgccgcacttcacgcagttcgtgcaggagctggaggacggactgagcgaaaaatacggctggtatctcacggccacgtggcactacgccttcgacaccgatctgccggaaaaccagcaggggaacatcgatggcgcaacgcccaatctggaggacgcgctgaacggctatctggcgggcgtcagcagtgactggggcgtgggcgtcagcgtggagtccaaggccgccaaccgggcagacttctacggcatgtacggcggattgttcttcctgggcatcatgctgagtatcgtgtttatcttcgcggcggtggctatcctttactataagcagctctccgagggctatgaggatcagtcccgctttgacatcatgcagaaggtgggcatgaccaagcaggacattcgccgcagcatcaacagccagctgctgacggtgttctatctgccgctggtgctggcgggcgtgcacctgtgcttcgccttcccgttcatccacaagctgctgatcctgttcaatctggacaaccgggggctgctgatcggcaccacggcggtgagctttgcggtgttcgcggtgctgtatgccatcgtgtacaagctgacggggaatacctactaccgcatcgtggcggaggatacagaaaaagaatagaacgaaagagacggcgggagccgtctcttttctgtatttttaggcaaaaaacgggttttgcgtggacaaatcacagcggctttctgtataatacatactgatacactattgtttgcaacagttttatatacagcgcggcgtgccgcgcgtaaggaggcagtatgcgtaatatctggacggtattcaaaaccgatatacggacgctgagcaagtgctttttcgcctgtgtggtggtggtcgccatcgccctgctgcccagcctgtacgcctggctgaatatctactccaactgggacccctacggcaacaccggggggatatccatcgcggtggcgtcgctggacgagggctataccgacgcggacggcacctacgagaacaagggcgacgacgtggtggccgacctgcgggaggctacatccatcaactgggtcatcgtggacaccgaggaggaggccaagggcggcgtggagtccggcgactactacgcggcggtggtcgtcgacaagcagttcagccggaatatgtaccggatgctgacggactggaccggtaagccggccatcacctactacgaaaacgccaagaagaacgccgtggccaccaagatcaccgacacggcggtggagacgctgaagcgctccatcagtgaaaactatctggaggtggtcatcgacggcatcatggagcagagcaatctgctggcggcgaatctgaccgccgacgacccggaggccgccgtgaagggcgtgctgtaccaggcccaggatctgctgcacgcctgcgggcggatgatggacgcctttgagacggcgggcggcagcggcgtgtcggagagcagcgcggcggcgctggaggcggccgtggccaatatcaacaagaacctgccggacggcgcacagctgcagcagacggcggcggagatacagctgcggctgaacacggccctggcccgggtggaacgggcgctggatcggctgaacagcgccattgggaacgcgccggagttgccgtcggcacagcagcagctgcgagatgcggcggcgcagctggaaaaggcggcggccacgttggaaacgtgggcggcgggactggaggcctccggcacagaggcgggtaagacccaggcggaggcggcgcggcagacggcggcggagtgccgcaagacggcaaagcagctgcgggcattggcggagagtccggattctgccgatctgctggcggactgcgacgcgttggtgaagtccctgcggacgatggcggacaggatccccgtgacctccaaggcgctgcaaaaggaactggacaccgtggccggtcaggtggcggacaccatggagggcatggccgcgctggccggggacgccaaggccatgaagaccgcgctggcggagaccgctgacgctgtgggtgacaccatggcgctgctgcggccggctacggagaagctgctgacctcgctggagagcaccatagacgacctggaggggctgaccacagacgaatacatggatacgctggtggatatcctgggcggcgacccggcggtgtacggccagtatttcccggaaatggtgcagaccagcgtgaacgcggtgtatcccatcgccaactacggctcggccatgacgccgttctacacggtgctggccatctgggtgggcggcgtgatattgtcgtccctcatcaagatacacgcccggacggagggcctgatcgatccgaagccggcggagctgtacttcgggcggtacctgttctttttcgtgctgagccagatacaggcggcggtcatcgttaccggcgacctgtacatactgaaggtccagtgcctgcacccggggatgctgtatctcacgggcgcgctgacggccttcacattcagcctgctgatctattcgctggcgctgtccttcggcgatgtgggcaaggccatcgtggtggtcatcatggtcatgcagatcgcaggctcctccggcacgttccccatcgagctgctgccggccatctaccagaagatctatcgcttcttccccttcccctatgccatcgacgctatgcgcgagtgcatctgcgggatgtacgggaattactactggcagcagatcggcttcctgctgctgttcgccgcggcggcgctgctgatcggcctgctggtgcggcggcccttcatgggactgaaccactttgtggaggagaagctggaggagacggagctgctgtgaaaggaggtgttgaccgatgacaaaagaacgggactatcaggagttgtatgaccgcctgctggaggaggtcagcaccctgcaccggaacaaccggcggcgcatacgcgtcggtatgcggatgctgctggcggtgacgctgggattgatgctgctgatgtttctggcgggggggaacaaggtgttcaccctgatgctgtggatactgtccatgttcgcagtggcggcatatctgatcgccgtggagtacgcggactatgagctgcaaaagaagctggagaacatcacccagatggagcaggagagcctgggcacactgctggagctgccggagctgcccaaggtgccacggatgggcctgctgctgcgccacggcacccgggaggaacaggagacgccggagacggaggcaacggcggcggcagcggcacctgcgccggaggagacgccggcggcagaggagatatccccggcacctgcggaggagacgccggtcacaaaggcaccggcagcgccggagccggaggcatattccgtggacgagatactgcgggaggtgcacggcggagcgccacaggcagacaacgcgccgacgcctgccgcgccggtatacagcggcgcgcgggtgctggaacggctgctggacgacccggagaagctggcgtccgatctggacgcgctgacccgggcgctgcaggggctgtccgatgacctgcggcgcggtgcggcggagagccgggaagggcaggtggaccgatgaagaacatctggaatatctttcgcgccgactggcggcggctgacggccagtgtggtggcggtggtggtgctgctggggttgtgcctggtaccgtgcctgtacgcctggttcaacatcctgtccaactgggacccctacggcacggcgtccaccagccgcatcagcgtggcggtggccagcgaggacgcgggctgcgaggtgctgggcctggaggtgaacatcggcgcgctggtgctccaggggctggagagcaacgaccagatgggctgggtgttcgtggacagccgggcggaggccctggacggggtggagtccggcgactactacgcggcgttgatcgtgccggaggaatttaccgaggattttgtgagcatcctgtccggcaatctgcgccacccgcagatacagtattacgagaacgagaagaagaacgccatcgcccccaagatcaccagcaaggccaagaccgccgtgcaggagcagatcaacaccacggtcatcggcaaggctgctgaggcgctgaccacggcgggctccgtgttcaaggccatggggctggattcggaggcgctggcggacggcattatggataagctgaccggtgcgcggcaggagatggcgcagctgcagcaggtgctgctgtcgctgaaggacgtgatgaacggggcggacgggctgctgaccgcggcatccgtgaccatcgcggacgcccggggaacggtggaggacgccgatgcggcggcgggcagcacggtgcagcttatcagcacgggcctgagcgcggcggacacggcgtacagtgacctgctgacggtgctgaacaacacggataaggtactgggcgacatcgaggatgccctgcggagtatggatacctctgccgccgacgaagcactgaaggcggacctgcaccggaagatacaggcggccatcgccgcgctggaggaccagctggcggccgccgaggacgaggccctgaaggcgcagctggagacggccatcgccgatctgaaggcgctggacgcactggtggatacgctggaaccgtcggccctgcagggaccggtgctggatatgctgcatcaggtgcggcaggagctgctggctgcggcggtgaggaccaataaggaggtcaacgaatacctgcacaccaccggggcccaggcccagaccacgctgcggtccgtccagcagctgctgggggccgtgggcggcagcctgggggaggtgtccggcacgctgaacagctacgccgacgccatgaccaccgtacagcctacgctggacgcgggcatcaccctggccaacacggtggagacgtatctggcggacatcgaggacgatgtgcgccgggtgacggagagcgaagccttcaagcgctttacggagctgatggagagcagcgacgccgacagcatggcggactacctcagctcgccggtgcagctgaacacggagatcatctatgagatcaaggactacggcgcggccatgtcgccctactacgtcatgctggcgctgtttgtgggcagcctgctgaccgccgtgatgctgaaggtaccggtgacccagccggagtttgccgggtgccgggccgtggagcgctactttgggcggtttctcaccttcttcctgatggccatggcccaggcgctggtgacggccttcgggtgcctgtacttcgtggggatggagacggcggagccggcgctgttcgtgctggcctgctgcctgtgctcactgaactttgccagcatgaactacgcgctggtgtacgccctggacaacgtgggtatggcgttgtcggtcgttatcatggtccttcaggtggccggatccggcggctcatacccggtacatgtgctgccgcagctgttccagacactgtatcccttcatgcccttccactacggcatggatatgatccgggagacggtgggcggtatgtacggcgacacatacctgcgctgcgcgctggtgctgctgggaatgtgcgcgctgttcacggtattcggcctgctggtgtactacccggcccgaagactgaacgcggctatcgccgccagtaaggaaaagtccggtatcatgtaaacagagagtgccccccgcaggcccatgggcctgcggggggcacttatgctgtcgaagccatgaaaaaaagttatgcccccttgctttttgccgtttaaggcaaaaaagcggggacgtttttgtgcagggtggagaaaagttcgcacggcgagaatttcccctcttttgctgttgcaaggcgggcgggcctatggtacagtacgggtggagtgttagaaaattaacaggctaagcgacacggcgttcaacacgttttaggaggagagagcatgagatcggaacaggagaaaacggcggccatcgtccgggcccatgactgcgacagcgcgaagctcatcgccatcttgcaggagatacaggcgtcggagaactacctgagccaagagaatatggaactggtggcggatatgctgcacatcagcgtctcacgggtgtacagcgtggccacgttttatgagaatttctcgctggaacccaaaggaaagcacatcatcaaggtctgtgacggcacagcctgtcatgtgcggaagtccgggcctatctacgacgcgatctatgagtacctggagctggacggcaagcgcaggaccagcgccgacggcgtatttacgctggagacggtggcctgtctgggtgcctgcggtctggcgccggtgatgacggttgacggcgaggtgtacgccaagatgacgccggagacggcgctggcggagttggaggccattcgcggaaaggaggcggcggaatgagcaagctgacacgggagggcttccgcgccatgcacgaacaggcggcggaggcgctggaacggagcagatcatccctgaacgtgctgatctgtgccggtacgggctgtatcgccagcgggtccatgaaggtgtatgagaacctgcgggaggagtgtgcccagcggggactgcaggtgtatgtgggcctgacccaccacggtgacgcggagaagagcctgcacatcaagatgagtggctgccacggcttctgcgagatgggaccgctggtgcatatcgagccgctgggtgtgatgtatgtccgcgtgaagccggaggattgccgcgagatcgtggagagaacgctgctgggcggcgaggtcatcgaacggctgacctatcaccaggacggcgtgtcctatccccggcaggaggatatccccttttacaagaagcagcaccgggtggtgctggccagctgcggcgccagtgacgcggaaaatctggaggaatacatcgccaagggcgggtacatcgcctttgaaaaggcactgttcaccatgaccggtgaggagatatgcagggagatcgccaattccggactgcgtgggcgcggcggcggcggcttcccggcgggacacaagtgggagagtgtgcgccggcacatagaggaaccggtgaagtacatcgtctgcaacggcgacgagggtgacccgggcgctttcatggaccgctccatcatggagggcaatccccattccgtgctggagggcatgatgatcgccggcgcagccaccggggccacggagggctacatctacgtccgcgccgagtatccgctggcggtgaagcgtttgcaggtggccatcgacaaggctgcggcggccggactgctgggcgacgacatcctgggcagcgggttcagcttccatatccacatcaaccgcggcgccggcgccttcgtctgcggtgagggcagcgccctgaccgcctctatcgaaggtaagcggggtatgccccgggtaaagccgccccggacggtggatcacggcctgtggggcaagcctacggtgctgaacaatgtggagacgttcgccaacgtgccgaacatcatcaacaagggtgcggcgtggtaccggagcatcggcaccgagggcagcgccggcaccaagaccttcgccctgacgggcaacgtggtgaacacaggactggtggaggtgcctatgggcgccaccctgcgggagatcatctacgacatcggcggcggcataccgaacggaaagaagttcaaggccgtgcagatcggcgggccttccggcggatgtctgaccgaggagcatctggactaccctatggacttcgactcgctgaagaagctgggggccattatcggctccggcggcctggtggtcatggacgaggacacctgcatggtggaggtggcccggttctttatgcactttacccagaacgagagctgcggcaagtgcaccccctgccgggagggcacaaagcgtatgctggagacgctggagcgcatcatcaataacgaggggagtctggccgacctggatctgctggagtctcttagcgataccatcacggacacggccctgtgcggcctggggcagacagcctgcaagccggtgatgtccaccctgcggaacttccggcaggattatctgcgccatgtggtggatcaccactgtcccatctgcaacgggcgcaaacgccggttggagatcaaaccggagctgtgcaagggctgcggtaagtgcgcgcggaactgtcccatggaggccatctccgggcagccccgtatgccctacatcattgacaacgagaagtgcatccactgcggcgcttgctggggcgcgtgccccttcggcgcgatcgacgccattgaggaggagtgagccatggcaaagggaattatggtcatcgacgggcagcgggtgccctttgacggcgagcgcaacgtgctggcggtcatccgcaaggcgggtatcgacatccccacgttctgctattactccgacctgtccgttcacggcgcgtgccgtatgtgcatcgtggaggacgtaaagaccgggaagatcgacgcctcctgctccatggagccccgggacggcatggagatcaggaccaacaccgcccggctgctgaggcaccggcggatgatactggagctgctgctggcggcccatgactgctcctgcactacctgtgccaaaagcggcaactgccgattgcaggagctggcccagcgctttggcgtgcggcatatccgtttccccaacaataagccccggtacgagaaggattacaccagctacgcggtgttccgggaccccaacaagtgcatcctgtgcggcgactgcgtgcgggtgtgcgaggagctgcagggacagggcattctgaactttgccttccggggcagcgagctgcaggtgatgccggcctttgacaaaaagctgggcgagacgaagtgcgtgggctgcggccagtgcgccgccgtgtgcaccaccggcgctatcaccgttaacgatcagatcggcaccgcgtgggcggccatccatgacccgaagaagcgtgtggtggtgcagatcgcgccggccgtccgtgtggcggtgggtgaggcctttggcattccggcaggcgtgaacgtcattgacaagatgaccacggcgctgaagctcatgggtgtggacgaggtgtacgacaccaacttcggcgcggatatgaccaccatactggaggcggaggagtttttgcagcggctgaaaaacggcgggccgttccccatgttcaccagctgctgtcccgcctgggtgcggtatctggagttcaacgcccccaagtatctgaagcatatctccacctgcaaatcgcccatggagatgttcgcggcggtcatccgtgacaaatacgccgaaaaagatgccgccgacgggcggactacctacaacatcgccattatgccctgcactgccaagaagatggaggcggcgcggccggagttcgtccataacggtcggccggatgtggatctggtgctgactacccgggagctggtggacatgatgcgtgagacgggcgtgcagctggacgagctggagctggagtccccggacctgcccttcggtttgggcagcggcgcggcggtgatttacggcgtcaccggcggtgtggccgaggcggtggtgcgtcactgcctgccagacaagagcaagaatgcgctgcgggccgtccgtgtcaccgatctgcggggagacggatccatccgccatgtggaactgaacgtggacgggcaggagctgcgtatcgccgtggtcaacgggctgattcacgccaaggagctgatcgcggatatcgaagcgggtaagtgcttctaccacctgatagaggtcatgacctgtcagggcggctgcgtgggcggcgcgggacagccctatgggctgagcaacgtgaagaagaagcggggcgagggactgtatgccgccgatgcctccgctatgttcaagcgggcggagaaaaaccccatcgtcacgtctttactcagggagtacggcgaggaaaagtgtcacgcgctgctgcacgtgcactacggagaataaaaaagcagccccccggctcacaccgggggctgcgggtaaagaaagagcatggccccgccggggccatgctcttagcttgcctttttatccagaatatacacggtgacgtttcggcggccccaggagtagcagtccgccttggtggggaaccacaggtccacgatgttgcccttgatggcgccgccgcagtccaaggcggtgcccatgccgtagacacggcggccgttggtggtctggatgaacattttggtgtagtaggggatcaccttggggtctacggccacggtgcccacgcctacggaggctcccaccgccgtggtccaggccgcgccgccgtcgccgccgctgtagtaggcggtggaggagcagagcatcaccttgttataggtcatggtgtcgccggaggcgaacagcaggtagccgccctcacccacctcgttggggaagtctttttcgatggtgtcgccctcctccacctcgtagacgcgggtgccgtagcgcaccagctccgcgtgtgaggtatcgtggctggcaccgatatacttggtagatactacctcaccgctgaccacagtgtcctcatacgtctccacgatctggccggggatacccttgcggatgatctcctcggtgcccttgtccatcaggggatccggtgagcgaaggatcttgtagtccgtctccacagtgacatagtgctggtaggtcagcgtatcgctgatgcggatggcggggtcctcgccggcgacattcagctccaccatctcgtcctcacccagacggatgccgctgcgccgcagcagggaggacaggcgctcggcctcggtggtgagggtgtgtgtgtcgtcgccgtgggtgatggtgacggtgcggcccggctccagcagcagctgcatggacttgtcgcccaggctgcggcgcagcagcagatcgtcataggtgcgctcctcgctgcgctcgtccagtacgtggggaccgtcgccgtccaccacgatgcagatggcgtccatggtgcgtaccggctccgccataacggcggcggcgaagatcaccgccgtgacggcgatcatggtgatggcgcggatagagggatgatcgcgcatgatgtggtgcacctcccgcagggccggggaacgcagggcgtcacggcagccggtcaccagccgtccgcggcagaaggcgcgccagttggccctgacgtcggaagcgatggcgtcccaggtccaggcaaagcagtggcccactgcgcgcacggcgcggatcagggcccgagccacgatgtagggcacatcgtggattgcctggcacaccgtggccggcgtgatgcggcgccgcggctttttcggctgcaagcgcttcggttgtgtgacgactgtttgttccatagtacctcgcagtatagccgccccgggaggtgttcaaacagggcggacaataaaaattgaaacaatttgtaacttttgttaccgattagcaatacccgtggagtatagcactatcttccaattttgtcaagttttgggggacgcggcacggaaaaagacaaactttttccggcttttcgttgcgcgggtggggaaaaggtggtacaatggcggcagtatgcagtgaaggagaaacacgatggatctgtgtgatcggaacgatatacaggcactgctggcgcggcacggcttccactttgccaaggcgctgggacagaactttctcatccggggtgacgtggcggaggatatcgccgcggcgggctgcgttcccggctgcggcgtgctggaggtaggccccggcatcggcgcactgacggtgcagctggcccggcgggcggaaaaggtggtgtcggtggagctggacaagcgcctgccgccggtgctggcggagactatggcggactatgacaacttcaccctgatcgagggcgacgtgatggcgctggatctggcggcggtgacggcggagaagtttccgggcttgccggcggtgctgtgcgccaatctgccctacaacatcaccacaccgtttctcacggcctgtgtccgggccgggtgcttccggcaactaacggtgctcgttcaaaaagaggtagccctgcggatctgcgcgaagccgggcacggcggattacggcgcgttttccctgctgatgcagtactacaccgtgccggaactgctgttcgaggtgcccaacagctgcttcatgccgccgcccaaggtgacatccgccgtggtgcgctgcgttacaagaaaggacccgccggtacaggtgcggagcgaggaggccttctggcggacggtgcgcgcgggctttgccctgcggcgcaagacgctggtgaacagcctgcagaccggctggcagctgcctaaggagcagctggcggccatcgtcgccggctgcggcctgtcccccaccgtgcggggcgaggccctgggcctggaggagtacgcgaggctgtccgatgcgctgctggcggcagcgggtgaataaaaagcttcccggcatttgccgggaagctttttattcgcctttttctatctttgcctccgtctcccgccggatggcggcgcgaagcgccgtgaggtatggggagaacgccacgttctcgtcggcgtaggtcaggttcaggtcgtactcccggggcagccaggaggagataggggactcgttgtgggcgatgacggcctccagcttgtccagcgccttatagagcttggcctccggcgtctccagcgcgtccatctccgcgtacagggcggccatctccgtgcggtaaggctggggcagcgtccctacccattggatcaggagggcgtcctccttcgctgtgtcggcgtcggtcttgagaaagctggggatatcgccggtaaagcactcgcccaggtcgtggatcaggcacattttaatgaccttgtccatatccgtatccgggaactcgtcccgaagaaagaaggccgccagcgccagccgccagctgtggtcggccacgctctcgtgacggttcccaggcgtccagcagtggcgggtggtgtccttcagacggttggcggtgtgcaggacggagagcagctcttcaggcttcatggcggggcctccttgcgtttttccacagtatagcatggtgccgcggtgccgtcaacgcttgcacttgcacggcggagaaaagtgtagtagaatagcggaagaacataaaggagggagactttatgggagttttgtacgcgctggagagcatccgcacgcctgcgctggataagatcatgtcggtcatcacgctgctgggcggcgagctgttcttcatggtcatcgccgtgacggtgttctggtgcgtcagcaagcgcgagggctattacctgatgatcgtgggcttctttggcacggtcatcaatcaattcctgaaaatactctgctgcgtgccccggccgtggataaaggacccggatttcaccattgtggagtctgcccgggcggaggccatggggtattccttccccagcggtcacacacagaacgccgtggccacctatggcggcatcgcccggtatactcgccgcggctggctgcgggtggtgctggtcgtgctgacggtgctcatcgcgttcagccggatgtatctgggtgtccacacgccgctggatgtgggggtgtcgttcctgatcgcggcggcgctggtgctgctggtgtatccgttgatggaggagtccgaccgccgtccggtggtgctgacgtacaccatcctggtcatggtgctgtgcagtgctgcgttcgtggggtatctgtacctgcggggggacaccggtgccactgccgaggacaccgccaactacgtcagcgcgctggagaacggctggaagctgctgggcgccacggtgggtatgctgatatccaacatcgccgaccggaagcacatacggttcgagacacaggcggtgtggtgggcgcagctcatcaagctggcagtgggctttggctgtctgctggccatacgctccgggctgaaagcgccgctgatcgccctgctgggcggcaacgccgccatcgccgggggcatccgctacctgctggtggtgctgttcgccgggtgcgtgtggcccctgacgttctggtggttcagccgcctggggagaaggtaaaaagatataaaaccgcccctgctccaatggccttggagcgggggcggtgctttactgcatgatggccagtgtgcgggcggcgtctatgtcgccgatggcgacatacgagaagtcctctgcatcccagcggccggagatatggttgttggtgacggtgtgctccgtccaaagtcggatgaccgtgcagaagcggtcggacgccgcggagatgctgtggaggggggcggtcacccagcagccggagtcgtctatgacaaagagggagctggcggtgttgccgtcaaactgggcgcgtagggcggcgcattgcagaatgccggggatgtcgcagctgccggtgtatgtactgcggcggaacgtgccgtggaaggacacgggaacctcctctgccgtgccgtcgttggggacagtgcagagatagccgttgccgtcgtagtcgatggacacgcccctgtcccagcaggcgaaaatgaatacggcggtgaacagcagcagaatgggaagccagaccttgcgggatgtacatatctgtcgcatggggagccctcctttacggtgttgtacctactgtaagtataccaaaaacggggagaaaagcaacaagaaaaccgtgcgcggctgtacggcgcacggtttttgtatgtacgggaggtcaggcggtctccttgggcttcttcaacgccacgatgacgcccacggtgatcagcaccgcaccgatgacactcatcaccgtgatctgctcgtccagcagcaggtagcccaccaccagcgtcacgaagggggaggcgtacagatagttgttggtgatgaccacgcccagccgctggaaggcgatgttccagatggcgaagcacacggcgttgccgaacacgcccaggaacagccagctcagcaggacgttggtctgggtgaacagggggtgcaggtcgggcataccgtccgtcagcagcatcagcggtacggcggtgatgaaggcccatagcatgacccggcgggtgaccaggaagttgtcatactgctcggtgtatttcttgataaggatggagtacacggcccacatgagggcggcggccagggcgatcaggtcgcccagagggttcaggtggaaggtcagctggccgttgagcaccaccagcaccacaccggcgatggcgatgaccgcgccgatgtacacgaatttacccaggcgctcgccattgcgggagaacagctgggccaaaatgaccgtcaggatgggggacagggcgatgatgatgctgacattggcggcgaaggtgtaggtcagcgctgtattctgcaggaagaagtagaagctgccgccggtaacgccgatgaggatgaacatcagctcgtccctccaggggagattcagagtcttgggccgcagcgcccacagcgtgatataggccaggcccatccgcagggggatgatctggatagcggtataggcggtgagcatctgcttggtcagcacgaagcagctgccccacaccagaatggtgaaaatggcgtacacatggcccatgactttttgcgtggcggacatggcggttctctccttatgactctatttctctcatcttacgcggcagctggccgcaaaaaatcattatacacggcggaaaaggaaaaatccagtagttcccgggtattttcttccaaatgccttaactttctattaagacgcttgaaatgcgcttgttttttttgccatccgtggtatgatggtagctatgaaaaatcaaggaggaaagactatgcacgcagcgctggtcatcatggcggcggggatcggttcccgctacggcggcagcaagcagaccgacggcgtggggccccacggagagatactgatggagtacggtgtgtacgacgcggtgcgggcgggctttgacaaggtcgtgttcatcatcaagccggatatgcgggagctgatggagcgcctgtgcggcaatatggcgtcccggctgcacacggcggacgggcggcccgtggaggtccgttacgcctatcaggacgacacgacactgccggcgtggtatacaaagccggcggggcggacaaagcccttcggcacggcccacgcggtgctgtgtacccgcgatatcgtacacgagcccttctgcgtcatcaacgccgacgatttctacggcgcggacgcttaccgcaccatatatgcggagctgcagcgcctgccggagacgggcgcggccaccatggtgggctatctgctgaagaacaccgtcactgcccatggcaccgtgtcccggggtgtgtgccatgtgaaggacgggtatctcagcgacatccgcgagacgctgaagatcgccctgctgcaggacggcgtcatccgggacgaggataccggagcggtgctggacggcgacacggtggtgtccatgaacttctggggctttgccccctccgtcttcgacgcgttggagacgtatttccacgacttcctccgcagcgaggcggggcagtcggtgaaggccgagtgcctgctgcccaccatggtgggcgacctgctggcggcgggagagctgcgtgtcagcgtgctgaagtcggcggaccgctggttcggcatgacgtatcatgaggaccgcgcccgggtggcgcaggcgctcagcaaactgcacgagacgggggcataccccgaggaattgaggtaacagaatggattacgaaagagaacgccgccggcagaagcgctaccgggaggccatgcggaaccgcatcatcgccgccgtgttgctggccggcatcatcgtgggtgcgatattcatcatcaagggctgcaaaaaggacgatgctccggcggacgacgcccagaacacgaatcagcccgtggacaatgtaggcgacactacgacaccggataacgtcatcgtggacgacgagctgctgacactggtgaacccctggaaccccctgcccgatgactggacggtggacctggtgacactggatgacggccaccgggtggacagccgctgctatgaggcgtatatggagatgatcaacgcctgcaaggcggcgggctacagcccggtcaactgctccagttaccgcgcgcaggagacgcagcagagcctgtacgacaacaaggtgcagcggctcatcagcagcggcatgagtgaagaggaggccaaaaccgaggcggccaaggccgtggccatccccggcaccagcgagcatcagctgggcctggcggtggacctggtggacgccaatatgcaggacctgacctctgctcaggagagcacggagacccagaagtggctcatggccaattcctggcggtacggcttcatccaccgctaccccaacggaaagaccgatatcaccggtatcatctatgagccgtggcactaccgctatgtgggcaaggacgcggcacaggagatcttcaaccgggatatcacactggaggagtatctgggcaagacggagcattgatggatataaagggaggggccgtccggcccctccctttatacgaagacatgaagaagttatttgcagtttttcgcgttcttggcgttcttggtattggtgttttccgtgttgtcggtggtgttggtggtgttggtgttcttggtgtttttggtgttcttcgtgttatccatgagatatacctccattttctgtaccctttgtacctcaggtacaaccatagtttcaccgccgccgcagaaaatatgtaaaaaaattctggaaaaagccgttgacaaacacgccgggatagtataaaatatccgagaaaacaaagaaggtcggtgcatccgcctcacctccagcaacggcaaagaggtcaacagcgtcatacaagcgcccgaaagggctgtttgtgttgtttcgcggatgcccggagcgtccgcgtttttattttggattggaggtgcttcggtattagcaaggtacagcatcaactgaacgaggagatcaccgacaaggagatccgactgatcggcgagaatggcgagcagctgggcattgtgtccggcgaggaggcgctgcgcaccgcagaggagcagggcctggatctggtaaagatctctccgcaggcaacgcctccggtgtgcaagctgatgaactacggcaagtacaagttcgagcagagcaagcgcgagaaggaagccagaaagaaccagcacgttgtcgagatcaaggagatccgtatgtctccgggcatcgacgtgggcgacttcaacaccaagctgaagaacgcgcagaagttcctgtccgacggcaaccgcgtcaaagtctccgtccgcttccgcggccgcgagatggcgcacaccgagatcggacgcgatctgctcaacaagttcgccgagctgtgtaccgaggtgtccaccctggacaaagccgccaagctggagggccggaatatgtctattttcctgtcccccaaggtcggcaaataagcatttcattcgcaaaggatcatattggaaggagaaaacaactatgcctaaactgaagacccatagcggcgcaaaaaagcgcttcaatctgacgaagaccggcaaggtcaagagagctcacgcgttcaagagccacatcctgaccaagaaggacaccaagcgtggccgtcgtctgcgcagcaccacctatgctgactgcaccaccgaggcgaccatccgcaagatgatcccctacaaataagatacgttttcgttagaataggaggcaattagaatatggcacgtgttaaaggcgcaatgatggcgcgtaaaagaagaaacaagacgctgaagctggctaagggctactggggcgccaagtccaagcatttcaagatggccaacgagcaggtcatgaagtctctgacctacgcctatgtgggccgccgcctgaagaagcgggacttccgtcagctgtggatcacccgtatctccgccgctgtgaagcccaacggtctgaactactccaccttcatgcacggtctgaaggtcgccggcatccagatcaaccgcaagatgctgtccgagatggccatcagcgatcccgtggcgtttaccgccctgtgcgagatcgccaagaaggcgtaaatcttgtgcacatacagcgctctgccgaaggcagggcgctgtttttcgcatttcggtgctggaaaaagcttgacaatactgctataatacccctgaaaagatcatggaaaggatgaatgaccatgtattgcatcagaaaagtcaacgacgactacacctgggtgggcgcggattgccgccgtctggccctgttcgagggcgtgttcggcgtgcccgacggcgtcagcttcaacagctatctcctgatggacgacaagactgtcctgttcgacacggtggacagcgccgtgcgtaccaccttccgtgaaaatgtggcccacgtcctgaacggcagagcaccggactatctggtggtccaccacatggagccggaccacgctgccgagatggccgacctggcccgtcagtacccggacatggccatcctgtgcagtgccgccgccaagaacatgatcgctcagttcttcgacgcggagctggccggccgcgtcaccgtggtgaaggagggcgataccttatgcaccggctgccataccctgcgctttatcgccgcgcccatggtccactggccggaggtgctgatgacctatgacgggacggacaaactgctgctgtccgccgatgccttcggcagcttcggcgcgctgaacggtaccctgttcgccgatgaggtggacttcgaccgggaggtgctggacgaggcacggcggtattataccaacatcgtgggcaagtacggcgcacaggtccaggcggtgctgcaaaaggccgccggactggatattcgtatgctgctgccgctccacggccatgtctggcggcaggatctgggctatatcctgggcaaatacgacctgtggagccgttgggagccggaggtccgcggcgtgatgatcgcctacgcctccgtgtacggcaacacggagaacgccgccaatatcctggcctgccgtctggtggagcagggggtaaaggtgaaaatgtacgatgtgtccgtaacgcccagctcctatgtggtgtccgacgccttcaagtacagtcacctggtgtttgccgcacctacctataacggcggcgtgtttatcaccatggacgaggttctgcgggacatcgcctcccacggcctgcagaaccgcggctttgccctgctggaaaacggcacctgggcgccggtcaccgcccggcagatggccgccctgctggagcccctgaagggctggcggcaggtgggggagagcgtgaccgtccgttccgccgcccacgcgccccagatggcggccatcgagggcctggccgccgccctgattgcggatatttccggggaaaagcagtaaaaaactgcggaaaacgggcaaaaacttcttgcattatgccgtgccgcgtggtattatattgcggtaaatccgcacagcttcagactttcggtcggtgccgcaaggttggccggagggcggaagaggctggaggtacaaactaaaatcaaaaggagaaacaaaccaacatggcaaatcagaacgtcgtatccatgaagtccctgctggaggcaggcgtccacttcggtcaccagacccgccgctggaaccccaagatggctccctatatctacacggagcgcaacggcatctatatcatcgacctgcagaagaccgtgaagaagctggaggaggcctatgccttcgtgcgtcagctgtccgagaacggccagaccctgctgttcgtgggtaccaagaagcaggcccaggaggccatcaaggacgaggctgcccgctgcggccagtactatgtcaacgcccgctggctgggcggcatgatgaccaacttcaagaccatgcgtacccgtatcgaccgtctgaaccagctgaagaccatgcaggctgacggcacctttgatatgctgcccaagaaggaagtcatcaagcacctgggcgagatcgagaagctggagaagtacctgggcggcgtgaaggaaatgaagaagctgcccggcgccctgttcatcgtggacacccgcaaggagcgcaacgctattgccgaggcccatcgtctgggcattcctgttgtggctatcgccgataccaactgcgatcccgatgagatcgattaccccatccccggcaacgacgacgccatccgcgccatcaagctgatcgcctccgttatggccaacgccatgatcgagggccgtcagggcgagcaggtggaggaggccgccgaggccaaggacgccgagtaagccaactcgatagataccgcgtaacgcacggggcagggaagtgtccctgccccttttaattcaacttttacaggaggaaatacaaatggcttttactgctgctgatgtgaagaccctgcgcgagatgaccagcgtgggtatgatggactgcaagaaggcgcttgtcgagtgcgacggcgatatggacaaggctgtcgagtggctgcgcgagaagggcctggccaaggctgccaagaaggccggccgcatcgccgccgagggtatgtcctatgccctgaccgagaacggcgtgggcgtcgtggtcgaggtcaactgcgagaccgacttctgcgccaagagcgacctgttcgtggcctttgtcaaggacatcgccaaggtcatcgccgagcaggaccccgccgatgtggacgccctgatgaactgcaagtatgtcggctccgacctgaccgtttccgagaccatgcccgagaaggtcatgtccatcggtgagaacctgcagatccgccgcttcgtccgcttctccgagaacaccagcgtgggctacgtccatgccggcggcaagatcggcgtgctggtgaacctggctgtggacggcggcatcgacgccaccgagatcggcaagaacgtcgccatgcagatcgcggccctgaacccccgcttctgggacaagtcccaggtcaccgatgaggtgctggccgaggagaagaagatcgcgctggccctgatggacaccgatcccaagatggcttccaagcccgaggccgtcaaggagaagatcgtcatgggcaagatgaacaagttctacgaggagaactgcctgctgcagatggagttcgtccgcggcgacatcttccagggcagcgtggagaagtacgtggccgacgccgccaagaagctgggcggcagcgtcaagttcgtggacgccgttcgcttccagaccggcgagggcatcgagaagaagcaggaggacttcgccgccgaggtcgctgctcagatgaacatgggaaagtaattgcagatgcacaaaacacccttcggctcacgccgaggggtgttttttcgcatataaaaaggaccgccgtgaggcggtcctttttatgtgcggatatgtcaggaaacgagcacgtggatgcgccccgcgggctcgccgtacttgtcggcggcaacggtgccgttcagcacggtggtgatgtagtccatgaccacctcgtccatggggatgcccaggtcgtagttggcggtggcgttgacaaagcggtagtaggtgtcgccgccgctggccataaagtcgttggtggcgatggtgtacgtggtcgccgggtcaaagtccttgccgcccacggtcttgatggtcacgcggttgatggtcttgggggcgaagtaggtggtgccgggatactcgtcgccctggtcatagcccttggtggtgtccacggtgaactcgatgccggatacctgggggaagccgccgatggcctccggcgtgcagaaggtggaggcctccagcacctccagcagctccgtaccggtgatcttgatgatgctcagggtgttgccgaagggcagcacggtgttgacgtccttcttggtgatgtcgccggcctcgatggtggcgcggatgccgccgccgttggtgatggccgcgtcaacagtctcgccctgctgctcggcgccccacaccagcgcgtcggtgatcaggtcgcccagattggtctcctgcgtgcggttgccggggtccttctcgccgttcagcgtcacctcggtcttggcgaacaccgtgccgtagtcggcctcgatctcggcgatgatggcggcggcgcgggcggcgatggcgtcgtcggcggccacctcaatgccctcggtgggcacgcacgtggtggtgatggtgctgtccttgatggccacaacgccgatgttctccagcttcgtgccggtagaggtcaggatagtgtcgcctaccttgcggtccgtgttggtcttctcaacgatctcctcctcagtggagtgagagtgaccgtcgatgaacacgtcgatgccggtgaccttgttcagcaggtcgatagagcggttgccggtggcagcggtctcatcgtcgatgcccaggtggcccaggcagatgacgtagttgcagccctcgtcctcacgcagcatattcgccatatcctgcgcgatctggtacatttcctcaccgccggcgaaggtcacgccctggatcttgccggggtgggcctttgtggcggtctccggggtgtccagaccgaacacgccgatcttggtgccgccgggggtggtgaacacggccgcatcgtcaaaggccagctcgccgttgtacttcacgttggcggccagcacggggaactgggcgttctccatgttcttcttcagcgcctcgaagccgtagtcgaactcgtggttgcccagcgccacagcgtcgtagcccaccatgttcatcagctccacagccgttgcaccctcagacacactcacagcggtgtcgccctgactgaagtcgccggcgtccaggatcagcacatacgcgccctcagactcatactggctggccagcgccgctaccttggcgtagttggaaacagcgccgtgtacgtcgttggtgtgaaggatcaccaccggctccgtggcggtggcgtccttaccgggagcgggctttttttcgccgcaggccaccagggtgaacaccatggccagggctagcagcaaagacagcagctttttcttcatactccttattccttcctttcagcgtttttgcacattttctgcgcctgctgtatggccattgtaccgtattccacggctgaacgcaagcttttcccggtttttattttacatggattttacaccagcgggatttttccctttacattgggcacttacaataaaaaccgtacaagggagttatccaaaacgacgaaagaaacgaggtaattcatatgaagaagatcattgcactggtcctgacagccctgctggccctgagcctggtggcctgcggcagcgagaccaagaccgacgacaccgacaagaccgaggacaagaccgccgccgagctgaccggcaccgtctccaccgacggctccacctccatggagaaggtcatcggcgccctgagcgagtccttcatggcgcagaacggcggcgtcaccgttaactacaaccccaccggctccggctccggcatcaccgccgtgcaggagggcacctgcgacatcggcctgtcctcccgtgcgctgaaggatgaggagaagtccgccggcctgaaggagactgtgctggcctatgacggcatcgccatcatcgttcaccccgacaaccccgtcagcgacctgtccgttgagcagatcgccaagctctacaccggcgagatcaccaactggaaggacgtgggcggcaatgacgccgaggtggtcctcatcggccgcgaggccgccagcggcactcgcgatggcttcgagtccatcaccggcaccaaggacaagtgccagtatcgtcaggagctgacctccaccggtgatgtgatcaccgccgtcagccagaaccccgatgccatcggctacgcctctctggcctccatcaaggacaccgtcaaggccctgaacgtggatggcgtcacccccggcgaagccaccgtcaaggacggcagctataaggtccagcgtcccttcgtgctggtgactgtggacggcaaggccctctctcccgcggcccaggcgttctttgactacgccacttcctccgacgcagcttccatcatcgccaaggccggcgctgtggcagtcgcaggttaacaggtaaggcacggacacaggcgacatccccgcgcggggtgccgccttgccccgtatctgctgaggtgcatatatgaaagcaaaacgatttatggagaacgccatccatggcttctttctgctgatgggtctggtgacggtgggctgcgtgctgctgatctccgtctacctcgttgtctccggcatccccgctatccgtgagatcggccttgtgaagttcctctttggccccgtgtggaattccaacgcggcggagccccggttcggcatcctgccctttatccttaccagtatttacggtactgcgggcgcgatcctgctgggcgtgcccgtgggctatatgaccgccgtgttcctggccaaaatggccccgccgaagctgaagaccgccgtctccgccgcggtgagcctgctggcgggcatcccctccgtggtctacggtctggtgggtatgctggtgctggtgccgggcatccgtcaggtcttccatattcccgacggctccggcctgctggcggccatcatcgtgctggccattatgatcctgccctccattatcaacgtggccatgacggccctggaggcggtgccccgtgagtacgaggacacctctttggcactgggtgccacggagacggaaacatggttccgcgtttccgtccccgctgcccgcagcggcatcgctgccgcggtggtgctgggcgtaggccgcgccatcggcgaggccatggccgtgatgatggtctccggcaacgtgcccaatatgccctccctgttccagagcgtgcggttcctgaccaccgccgtggccagcgagatgggctacgcggcggcaggtctgcagcgtcaggcgctgttttccatcgcgctggtgctgttcctgttcatcatgctcatcaacgccgcgctcaatttcttcctcaagcgaagtaaggagaagtgaccatggacaaacatcaattctctgcccgccgccgtatctggggcgggaccatgcggggcctgatggtcctctgcaccgccgttacctgcgcgctggcggtgtttctcatcgtctatgtgctcgtcaagggcgtgcccaacctgagctggcagctgctgagcaccaagcccagctatctggacggctccatcggtatcctgccggatatcatcaccaccgtctgcacggtgctgaccacgctgctggtggtgctgcccctgggcgtttgcgccgccgtgtacctgacggagtatgccgccaacaagagggtagtggccgttatcgagtacgccgccgagacgctgtccggcatcccctccattatctacggcctggtaggccagatgttcttctgtcagttcctgggcatgaagaaatctcttctcgccggcgccatgaccctggtcatcatgaacctgcccaccatcatgcgtactacgcaggagagcctgaagaccgtgccccagtcctaccgcgagggcgccttcggtctgggcgccggcaagtggcgcaccatccgcacggtggtgctgcccagctgtgtggacggcgtgctcaccggctgcattctggccgtgggccgtatcctgggcgagacggcagccctgctgtacaccgcgggctttgcccacacgctgtacaacagcctgcgcgccacgctggagggctccggcgccacactgtccgtggccctgtatgtctatgccaaggagcagggcgagttcgatgtggccttcgccatcgccgccatcctcatggcgctggccctgctcatcaacctggcggctatgctgaccgggcgttacttcaagaaacggaggagcctatgagcgatatcatcaccgtaaacgatctgaacctgtggtacggacccacccaggcgctgcaccacgtcaccatgtccgtgccggagaacagcatcaccgccctcatcggcccctccggctgcggcaagtccacatttcttaaaacgctggaccgtatgaacgacctgatccccggcgtaaaggtggagggccaggtgctctacaagggacaggatatttatgcccccggcgtggacgtcagccagctgcgccgtgaggtgggcatggtgttccaaaagccaaatcccttccccatgagcatctacgacaacgtggcctacggcccccgtacccacggcatccgcaacaaagccaagctggacgagctggtggagcagtccctgcggcgtgccgccatctgggacgaggtgaaggaccgcctgaaaaagaatgccctgggcctctccggcggccagcagcagcgtctgtgcatcgcccgtgccctggcggtggagcccaccgtgctgctgatggatgagcccacttcggccctggaccccatctccacctcccgtatcgaggagctggcggtggagctgaagcagcattacaccatcgtcatcgtcacccacaatatgcagcaggcactgcgtatctcggaccgcaccgccttcttcctgctgggcgagctggtggagtacggcgacacggagaccatgttctccacgcccagcgaaaagcgcaccgaggattacatcaccgggaggtttggataatgcgtagtcaattcgataaacagctggcccagctccaccgcgagctcatcgagatgggtgccctgtgcgagcaggtcatcgctctgtcctctcaggccctcaccaaccgcgataccgccctggcggagaaggtcgcgcccctggaccacgagatcgaccgcaaggagcgcgacatcgagaacctctgcctgcggctcctgctccagcagcagccggtggctggcgacctgcggcagatctccgctgccctgaagatgatcacggacatggagcgtatcggcgaccaggccgacgatatagccgagatcctgctctgccgcgccggccggcctctcagcgccggcgacaccctgcgggatatggcccgggccaccatccgcatggtcagcgagagcgtggacgcctatgtccggcaggatgtggacctggcccagcaggtcatcgccgccgacgatgaggtggacggctattttgaccggatcaaggcccacctcatcgaccgtatcgccaaggacgtggatgacggtgaagccacacttgacttactgatgatcgccaagtattatgaacgtatcggcgaccacgccaccaacatcgccgagtgggtgatgttttctgtcaccggcgtgcacaagaccgaggccacttgagccaaaaggagggaccccacatgatctggtgtgtagaggatgacgccagcatccgcgatatcgagctgtacgccctgcgatccgccgggctggaggccgagggctttaccgacggcgccgccttctggcaggccctgcaaagcgaaaagcccgacctggtggtgctggacgtgatgctccccggcatcgacggcacggagctgctgggccgtatgcgcgcctccacgtccctgcgccgcatcccggtcattatggccaccgccaagggcgcggagtatgaccgcgtccgggcgctggacggcggcgcggacgactatctgaccaagcccttcagcgtcatcgagctggtctcccgggtcaaggcggtgctgcgccgctgccagccggagggagacagctccatcctccgcagcggcgaggtgtcgctggatacccgtgcccacaccgtcctgtccggcggcgaacgcgtcgacctgacctacaaggaatacgagctgctgcgcctgttcctcagccaccccggcacggcctacacccgcgaccggctgatggagctggtctggggcgtggattactgcggcgagagccgtaccgtggatatgcacatccgtaccctgcgccagaagctgggcaaggccggcgcacacatcaccacggtccgcggcgtgggctaccgttgggaggagaccatatgacaaaaaagatatttcgctccaccgtggcggtggggcttgcggtgctgctggccagtctggtcattatcatgggcgcactgtacacctatttcggccatgtccaggagcagcagctccgggatgagctgtccatcgccgctgcggccatggagtccggcgacggcgaggcctatctgtccaagctgcactccgacaattaccgcatcacctggctccgcgccgacggcacggtgctctatgatacgaaggctgacgctgcggctatggagaaccacgcccagcgcgaggagatccgtcaggccctggccaacggcgccggtgagtccagccgttacagcgccactctgctggaaaagaccctctactacgcccgccggctgccggacggcacggtcctgcgcctgtccgccagccgcgtcaccatgggcgtgctgcttctgagtatgttccccgctatcctggcggtcatcgctgtggccctgatcctctccggcattctggccggccgcgtgtcccgccgcatcacccgccccctgaacaccctggacctggagcaccccctggaaaacgacgcctacgaggagctttcgcccctgctgcgccgactggagcaccagcggcgtcagatcgacgatcagctgcgttctctgcgccgccggtccgaggagtttgaacagatcaccgccagcatgaccgagggcctggtgctggtggacaacggcggcaccatcctcagcatgaaccccgccgcctgcgccgtgttccacaccgacgcggcctgcgtgggccagcctctgctgaccgtggagcgcggcagcgccgtcagccacgccctccacgatgccatggacaccggccacggcgagacccgtatggagcgcgacggccgcgagtaccagttcgacatgacccgtatccaggccgacggcgaggtggtgggcgcggtgctgctgaccttcgacgtcaccgagcaggcctacgccgagcgcaaccgccgcgagttcaccgccaacgtctcccatgagctgaagaccccgcttcagggcatcatcggcagcgccgagctgctggagaacggcatggtccggcctgacgatgtgccccgcttcgtgggccatatccgcggcgaggcccagcgcctggtgacgctgatcaacgacatcctccgcctgtctgagctggacgagggcggcagcctgcccaccgagccggtggagctgctctccctctgcaccgacacggtcaagtcgctggagagcgccgcacagcagcgccagatcaccatgaccgtcaccggcgatgccgttacggtccctggcgtccgccgtctgctgaccgagacggtcttcaacctctgcgacaacgccatcaagtacaataaggacggcggcagcgtcgccgtcgccgtgggccgtgacggccccgacgccgtggtcacggtggccgataccggcatcggtatcccgccggagcaccagggccgcgtcttcgagcgcttctaccgcgtggacaagagccactccaaggcctccggcggtaccggattgggcttgtccatcgtcaagcacgccgtggcttatcaccacggcaccgtcacgctggacagccgtgagggggagggcaccacctttaccctccgcctgccgttggaagcgtaaacgcgaaaatgcccgcctctgcgggcgggcatacaaaaagaccacccgatagggtggccttttttgtcataaatgcgcctttgcgtgggcacagatggcgtcaaaggtcttctgactgatatcgtgttcgatcttgcaggcatctgtctccgccgtagcggcgtcgatgcccaacgccatcaggaatttcgtcagcgtgtggtgccggtccagcatacgctcggcgatggccataccgctggccgtcagggtgatgagtccgtccttgtccatcgtgatatagccgttttcccgcagccgtttggtggcgtaggtcacgctgggttttgtcacgcccagatgctcggctacgtcgatggaacggatgtagccgtgctgctgctgcatcatcagcatcgtctctaaatagtcctcggaagcgcgcagtatctgcataaaaagtgtcaccaactttccccaatacacttttaacagcataccacaattttcacaaacttacaagtgcggtaaaaaaatttcgttctccctattgacaaagagggtttgaggtattaaactgtgccataggttaaggagggctaaccgtcgcggtccgccatgggccgggaaagtcctttcagaactgcttttttcagacacagggttagcgcaagctaaccgtgaaacggagggatacacatgatgcctttgatgctggcagacgccggaacggagcagctcatccacaaggtgggcggcagcccggaggtcaaaaagcacttggaggacctgggcttcaccccgggcagcaccgtcacgctggtgtccgccatgggcggcaacgtcatcgtgaaggtcaaggagtcccgcgtggccatcagcgaggaaatggcccgcaagatcatggtctgatagccgcgccaagcggttattgcatttgagaaacaaaaatatcacatagaaggagagcagaagcatgaaaacattgcgtgaagtcaagatcggcgagaccgtcaaggtcgtcaagctccacggcgagggccccgtcaagcgccgtatcatggacatgggcatcaccaagggcgtggaggtctatgtccgcaaggttgcccctctgggcgatcccatggaggtcactgtccgcggctacgagctgagcctgcgtaaggccgacaccgaaatgatcgaggtcgagtgatgacctgcggcgccgtgttccggtgccggaaatacgttcgttatttaaattcatctgtatataggttcaacaagattaaccggaaggagagacactatggaaaaacagataaagatcgcgttggcaggtaaccccaactctggcaagaccaccctgttcaacgcgctgaccggctccaaccagttcgtgggcaactggcccggcgttacggtggagaagaaagagggcaagctgaagaagcacgatgacgtggccatcatggacctgcccggcatctactccctgtccccctacaccctggaggaagtggtcgcccgtaactacctgatcaccgagcgccccgacgccatcctgaacatcatcgacggtacgaacctggagcgtaacctgtacctgaccacccagctgaccgagctgggcatccccgttgtcatcgccatcaacatgatggacgtggtccgcaagaacggcgataagatcaacgtggaggagctgagccgcgagctgggctgcaagatcgtggagatctccgccctgaagggcgagggcattatggaggccgccgaggccgctgtgcaggccgccaagtccaccaagaccgttcccatgcacaccttctccggccccgtggagcacgccatcgcccacatcgaggaggccgccgtacataacctgcccgaggagcagcagcgctggtacgccatcaagatcttcgagcgcgatgacaaggtgctggatcagctgaagatcgacccgaccgtcatggcccacatcgaggaggacatcaaggccgccgagaaggagctggacgacgacgccgagagcatcatcaccaacgagcgctatgtgtacatcgccgagatcatcaaggcctgctacaagaaaaagaacgccggtcagctgtccgcttccgataagatcgaccgcatcgtgaccaaccgctggctgggtctgcccatcttcgccgcggtgatgttccttgtgtactacatctccatggtcaccgttggctccgccgctaccgactgggcaaacgacggcctgttcggcgacggctggcacctgttcggcatcggctccggtgagtacaacgaggtgtccgaggcgtatggaaacgcgtccctgatcgtggacggctacgaggcctacatcgaggagaacggcgccttggccgccgacggcaccttcacctacgacgtggaggacgaggagacgctggccgttaccaccgagacggcgacgctggccgactatgagaaagccaaggccacgctggacgagatcggcgacgagcctgaccccgccgactacggcgtgtgggtgcccggtgttcctgtgctggtgggcaacgcgttggagtccgccggtgctgccgactggctgtccggcctgatccttgacggtatcgtcgccggtgtcggcgcggtgctgggcttcgtgccccagatgctggtgctgttcctgctgctggcgttcctggaggcctgcggctacatggcccgtatcgccttcgttctggatcgtatcttccgcaagttcggcctgtccggtaagtccttcatccccatgctgatcggtaccggctgcggtatccccggcgttatggcctcccgtaccatcgagaacgagcgcgaccgccgcatgaccatcatgaccaccacgttcatcccctgcggcgccaaggtgcccttcatcgccatgatcgccggcgccattttcggcggcagcgcatgggtgtccacctccgcttacttcatcggtatggccgccatcgtcatctccggcatcatgctgaagaagaccaagatgttcgccggtgaccccgctcccttcgtcatggagctgcccgcctaccactggcccacgctgggcaacgtcctccgctccatgtgggagcgcggctggtccttcatcaagaaggccggcaccatcatcctgctgtccaccatcttcgtgtggttcaccagctacttcggctgggtggacggcaccttccagatgctgtccgatgagcagatcgactgctccatcctggcggccatcggcggcgccatcgactggatcttcgcaccccttggctggggcaactggcaggcggtcgtcgcctccatcaccggcctggtggccaaggagaacatcgtgggcaccctgggcgtcctgtacggcggcggcgacggcagcgtctacgacgctatggccgcggctttcaccggtatcaccgcttacagcttcctggtgttcaacctgctgtgcgccccctgcttcgctgccattggcgccatcaagcgcgagatgaacagccgcaagtggacctggttcgccatcggctatcagtgcgtgttcgcctatgtgatcgcgctgatgatcaaccagttcggcgctctgttcaccggcaacgccaacatcctgggcgtcatcgtggcggtgctcctgctggccggcatcatctatatgctgtgcaagccctacaaggaagccaccaagctgtccgttaagtaaactgtccccgtaattaccctcttaccccatagaaaggagtgaacttccatgctgcaatggctgtcagcaaacctgggcaccatcctcatcagtgccgccttacttgtcgttgtgatcctcatcatccgctacctgctgcgccagaagaaggcgggaaagtcctcctgcggtgccggctgcgcccactgcgccatgcacggccagtgccacagccagagctgcaagcactgaatagagcaggggggaggcatcgtcagtgcctccccccgcgtctaaaaggagatgtcaccatgacagaaaccatcctgaaggtggacggcatggcctgcggtatgtgcgaaagccacatcaacgacaccgtccgaaacaagttctccgtccagaaggtcacgtcctcccacaccaagggcgagacggtgatcctctcggagcagcccctggaccagcaggcgctgcgtgacgccatcgccgccaccggctacacggtcacagcgatggacgcccatccctacgagaaaaagggtctcttttccttccacagaaagtgacccgtcaaagaagcgccctcccccggcgcttttttgaaaaccgatagttaaatcactctaaccaaagttagaagaagctaaccgcgtatcatccggaagaaacgagcaaaaataccgtcgagcaatattcggcggcacggaacagaaaggaagtgcgatatgagcgtcgtgatcttaggcggcaacgagtgcatggagcgtcgttacaaggacctgtgtcagtcctacaaatgctccgccaaggtgttcaccaaaccctccggcggcctgaaaaacaagctgggcagtccggacctgatgatcttcttcacctccaccatgtcccacaagctggtgcagagcgccctcagcgagctgaagggcacgccgacccgtatcgagcgctgccataccagctctctgtccgccctgcggagcattctggaaaaacacgccggttaaggaggaacccctatgtccgaagagatggtcgtgcgccagtgcgcccccaccctggccggtatcaagaccggcagtctctttccctgtccctgcacggaccgggatgcgctgctggacgaggtgcggcagctgaaccgccgcctctcgcccaagggcctgtgcctgctgcccctccgctttaccgagggcagcgccctgctgtacctctaccgccccgccactctccgccgcgatctcagcgacgatctggcccgccgcctgctggcggaggccggctatgacggcggcagctgcggccgctgtgtggccacgctgatccgccgcttccgtcagggtgcggacttcccccacgagatcggcctcttcctcagctaccctcctgaggacgtcaagggcttcgtggataaccgtgcccgcagctacaagtgcgcggggctgtggaaggtgtacagcgacgaggcccgggcccggcggctcttcacccggttcaagcgctgcacggacacatactgcaagctctggcaggccggcgcgacgatcgatcagctggctgtggcggggtaacgatcgaaaggagaaacgacaatgaaaaagactgctgtgatctattggagcggcaccggcaacaccgaggccatggccaatgccgtgctggagggcatgaccgccgccggcgcggatgccaagctgctgacggtggaccaggtgaacaccgccgagctgaacggctatgccgccattgccttcggctgcccggccatgggcagcgaggtgctggaggagatggagttccagcccatgttcgacgcctgcaagaactgcctgggcggtaaggccgtggccctgttcggctcctacggctggggcgacggcgagtggatgcgctcctgggaaaaggactgcgccgatgccggcgtgaacctggtctgcgacagcgtgatctgctgcgaggccccggatgacaccgccctggatgccctgcgcgccatgggcaagaccctggcagcttgaacgctttgcacctcctgcgccgccgtctgcggcagcgcgggcagacgctgctgccgctgctggccgccctctccgccgcagcggtggtatacagatgaaaagcacccctcaggccaggcggcctgaggggtgctttttttacagccatttcttgtgcctgaagaaccacagcagtcctgccaccagcagtatgctggcggcgatgatcacgggatagccccactccgactgcagctccggcatatttacgaagttcatgccgaaccagccggtgatcagcgtcagcggcaggaacagcaccgtcacaatggtgaatacccgcatcaggtcgttctgctggatggccagctggctctgataggcctcccgcagctgggccaccagctcctgcagcgcgcataccttttgcagataccggcccgtccgccgccccagcacctccagccgcgccagaatgtccgcctcgatcagcccgttatcgttgtcgcacatctcatcgaagatggcgtccagctgctcatagtaccgcttcaggtgcagcagctcccgccgccacgcggcgatgcgccggggcgcgtcgtccttggccttgccctccagtatggcgctctcgccgccgttgatctgggcctccagcttttccagatacgccatgtcgcccttgaacagccccgcaaaaaaccggtacagcagctgctggtcattcagcggtccgcctgcggtcagcgtgtccaccgcaccctgcacatactgctgtgccgcctcgttccggcagaagaaaaacaggtcctcccggtcaatgtataccagcaccttgccgctttttcccgccttccgcacatcgtaccagtcaaaggccagcaggtcgaagtcggcaaaggcctcaaagctctccgtctgcaattcacccacatattgaaatacggcggcgtccatccgttccgccacctgctccatatccttccacagcagcacactccgcatatcgccaccgtcctttctcccgcagtataccccaccgcgtccccttcgtcaagttgactttcccgcggcggactggtacaatagagccagcgcagcaccattctgaaacaaaggaagtggttttatgcagttgacaccccagcagcaggccctgctggacggcgcccagggcgagaccatggccaaggtggtcaagacgctggtcatgtacggcgataccttcggcgcacagcggatggtgccggtcaccggacagtacggccacaccgtcatctccttcggcctggcggtgatgaagccggtctacgatctgtacgaccgtcttatcgagtccggccttaccagcggtcagaaattcactgctgaccccctgcccctggataagcacgtccccaccagtctgttggaggacatcgtcttccgcaagatcatgtacacccagcaggaccggtatgagcagcagctgaaaaagctgggcatcaccgccgataacgcctatacctgtacctgctatctggatcaggtgggcaacacccccaaacagggagatatcctcagctgggcggagtcctccgccgtggtctacgccaactccgtcctgggcgcccgctgcaaccgcaacagcggtatgctggagctcatgggcagcatcgccggcttcgtgccggagttcggcctgctcaccgacgagggccgcaaggcccattggctggtggaggtcaaatgcacccgccggcccgaggcccagcttctcggctccgccatcggcatgaaggtcatggaggacgtgccctacgtccggggactggacgagtggctgggcacggagctgaacgacgagaaccgcgcctacctcaaggacttcggcgcggccaccgcctccaacggcgccgtgggcctgtaccatgtggagcacctgacccccgaggcaaaacagcagggcgaggccctgctgcgggagggctatcggacctacgtcatcgatgacgccgagctggagcgcgtgaagcgcagctatcccgtcatctggaaggaccctgccgccgcgccgcagctgtgcttcgtgggctgccctcacctgacgctggagcagctgaaggactggacggagaagctcaccgatgccctgcgggcgcagaaccgcctgcaggtggccgttcccaccgtgttcaccgccgccccggcggtgctggacgccttcaaggacaccgtggagggctacaagctgcaaagcatgggcgtgatcctcagctacatctgcccgctgatgtacatgaacaaccccctctgcaagaagaaggcggtcatcaccaactccaataagctccgcacctacaccagcgcccggtactataccgacgcggagatactggacatcctcaccggaaaggagggacgctgatatgcagcagttcaagggccgcgtggtggtccccggcacctgcaccgccgaagcgctggtcagccatggcggcttcaacaccctggccagctaccagatggccatgatgttcggcgacaagcaggtcaagtgcggcgaccagaataaccccgacatctacaaaaagcccatgatcggcaaggccctctgcctgccccagaccatcggctccaccaccggcggcatggtgctcttcacggtgtgctcccacggcaagcagcccgcctgtatgctcttctccctgcccatcgactccctggccgcctccggcgccattctgggcgatgtctggaccgacagcaaaatgcccgtggtggactccctgggcgatgagttcctgcaatatgtgcagaccggcatgaccgtcaccgtgggtgacgacggcctggtcaccgtggaggactgacatggacgatatctacaccaaaaagcccgaggagtgcgcctactccttcacccagcacaccgcctgcgagttcttcccctgccacaagaccggccacccggaggacttcaactgcctgttctgctactgcccgctgtacaccctgggcagcaagtgcggcggcaacttcaggtacctggaaaacggcgtcaaggactgctccgactgcctgctgccccacggtcggggcagctacagctacatcaagtccaagtacccggaactcatggagctggccaagaaaaaccgctgagaacgcaaaaaagagaccgccccgcggtctcttttttcatcattatttcagcagcagtgtgtggtcgcccttgttgcacatatagtacagctggtatcctataggttctttcgtaccataccaatcgcggtccagtatcaccgttaggtgtccgtcctgcaagttgaccgtcgtaccgtccaggaaattgatctcggtccgcatatcacctacttgggtcccaacatcctcccgaaactcccccgtggtcaggtagtcgatctgcagctccgcgtaatacgcccgcacgttggccatgtcggcggccaccttggccttgtgcagactgccgttgaacacagggatggcaatagccgccagcacagcgatgatcgccaccacgatcagcatttccatcaatgtaaagccgcggttccgtttcatagtctataccctccggaatcgttttttttgataaggtttccatattataccctaccgacgcccggattgcaaccctattttcccgtcactacctccgcaaagccctctccgaacacccgcacggccttcagcgcctcctccagcgagttccccgccgcgccgatctccaccagcaggctaccgggtgtgaagtactcattgtagtccgaattccgcagcgtcagcggccgcatcagcgtgggatagcgctccgtcaggtgctgctgcaccgccacggcgaatttcaggttctcctgccagccctcccagctgctgcccatcaccaggctcacctgcgcgcagtccgggtcctcccgcgttaccaccttgtactggtgcccggccttgtcctccagcgcgtcccggtgcacatccagaatgaacccgatgctggggtacttctccatatacgcctcgatggcgtcctccgcccggtagtacgccccgttgtactccgggtcgtcatacagcgcccggtcgtgcagcaccgatatcccgtagcccgacagcaccctcgccagctcgtcgcccacccgtatcacgctcacgctggcatccgccgtccgaaagctccccgtgtcctcgtattcctcccccggcggcatggtgtacgcctcgctgccgtgggtgtggacgatcagcacctgcggcgcgtcctcgcccagcgccgccgcaaacgtcccgtcaaacacgatgccctccaccgtctgccgcgaactgttcttgatgaacacgtcccccacccgggtatacccgttctcatccgccgccaccaccgacagcggcctcgattccccctgcccgccggtgttctccgtctgccccgttgttgggccctccggtgtttccgccggggcgggggagggcgtctcctccgcgttccggggcgtttctgcctgcgtcacctgcgtctccgccgccagcagcatcggcgactgccgcagcaccgtcagcaccggcagcggcagcgagtccgccgcccacaactcccccagctcccactgcaccagccgctgcgccagtgagctgtcccgtaccgcctgtgccgccgcccgcaggtcctgactccccgcgcacaccgccgccagccacagcacgaacgccccgcacaccgccgccgcgccccgccgccatttcacaagccccaccgcctttcagacaagcctatgtccggacaagccaaaaaatacccaccataacttcctctaatacctcccacaccgatttgttatgccaatatctggatattcccgttgcctttcgcgacactttctggtaagatggtcgtacaacagagcctgcgcgccgcaaaactttcccaacaagaaaatttgcggcacacaggcccgggagagaaatatgtgagccatagaaggaggaaccgccatgaagagacgactgctccccatcctgatgaccctggtattggtatgcgcgctgcccatatgggcagcttttgttacatcgggggatgtaacaaatcccctggtgtccaccgccggtgcggcatcgccgcctgacaacgccgcaaccaggctgaaatctgccatatccaacggcggaactgtccagctgacagaggatatcgagatcagcgagacattggtagtaacgagagatgtgaccctcgacctgaacggccatgtgctcaagatgaccggcgacgtcagtgtgctcaaggtgagtgaccgtgcgaccctgaccatcacggacagccgtccccaaaatccgcatacaggatcctatgggcgtttgcctgccggcggtgtcatcaccggcggagagggaatgaacatgacgggaatttacaatgttgggggagccgtattcctggagaatggtacaacgctgaagctggagggcggcacgcttaccggaaacagcagtcgcggcagtgtctttatcgatggggcgatctttgaaatgtccggcggcacgatcaccggagaaactgtcggcgtacgtaataatgtggggaccttcaaaatgaccggcggccgtattacgggatgctatgaacagggcgtatatatgtccaccgggtggatgaagatgtctgaagcggcgtatatcggagggaataacacgagaaataccaaggaggacattttcatagaggaaacgctccagacaagtgccagactgtccgttaccggcggtaccattgagggaaatgtgcgtataaaattctggtggaattcggggatgacagaggacaaattgggaaaagtggatactgtcgtgcaaggtgcgaatgtgcttgacggacatatcaaagtggaaataggcaccagcggcatttgtgtggactacaacaccgtcaatttcattgacgaggtcgccaatacaaggaccctaaagcttgttttacagcctaatgcagttgaggagccggaaactcccaccacagtaaatggccgggaatttatgtactggacgaaagagggcgtttccgaagcgtgggattttaacaccgaaataaaagagccgctgacgctgtatgccgtgcggaccccggcctcctccggcggctattactactaccctaccaccgatactaaggccgacgatgccaagggttctcccaagaccgccgaccccggcgtagccctctacgccgccctgtccctcctgtccctcaccggcctggcctacaccggcagaaagaaattctgagcacataaaaaatgagcacccggaggggtgctcatttttttatgcctgaaaccagctccacggcggctcctgcggcggcgccagctcaaacgccatggcctttcccgtctccgggtgccggaacgccacgcctgccgaccacagcgcgatgggggtgtctgcgtccgccgcgtccccgtaccgccggtcgcccaccagcggcatccctcgtgacgcgaactgcacccggatctggtgcgttcgccccgtcagcagtcggacccgcaccagcgcgcatcccgcccgccggtccagcacccggtaccgcagccgcgcctcccgcacatcctttcccggcccctcggccacataggtcatccgccgcgccttgtcccggcccagcaggtccgtcagctctccctcgtccgccttcggcattccccgcaccaccgccagatacgttttctcgaattccccctcccgtatctgccgtgacagttccccggcggcgtaggcgctccgtgcgaacaccatcagccctgctaccggcgcgtccagccggtgtaccgtccgtatgcacgcggtgtgcagcgtctgccgcagcagctccggcataccgttccgcacgtcagtggagatcacgcccgcgggctttaccgccaccacgatccgcttatcctcatacacgatatccatgatgcgccccttccgtacctgtttttgctgtgcctgacacatagcttgcatggccctgcaacatcctctgcactaaggtatcataagcgtacaagaaaagtaaagtaaaagtaacacaaaaagcaagaaaaaaatacttgacaggacgggtctaacgcgttagactaaaaacgggtctactacattcgaccaaggaggaaaaccctgtggaaacaccgaaaatttttgacagcgaactgcgcttctgcgagatactctggtcccatgagcctataaagagcagcgagctggtccgcctctgtgccgaggagctgggctggaaaaaatccaccacctacactgtgatcaagcgtctcgccgagcgcggcgtggtgcacacggagaacgccgtcgtcaccgcgctggtgcggcgggaggacgtgcagcgcgcggagagccgcgcctttatagcccacaacttccacggcagtttgccagcatttctgacggctttcatgggaaattcaaaactttccaaagaggatgccgatgtgctccacgccatgatcgaccgcttcgagcagaagaattccggacgtaactgaaccgcgctgcggcatacagtgttatgccctgtgccataaaggagaagaaaatgaatagcctgtttacctccgtattggaaatttcctggcaggcgggcctcatcgcgctggcggtgatggcggtgcggccgctgctgcgccgtgcgccccgccgggccgtgtgtatgctgtggctgctggtagccctgcggctgctgcttccagcccgattgacagtagagagccccgtcagtctccagcagcccgaaagcccgcccatccaggcctatcaggagcttcgccagcaggaaaaggtctatgtttccgccccgccggagcagcgcctggaaatggcaggacccgctgcggcacaaggctttgcgctgctggatcagctgcccgccatctggctgacgggcgtgggctgcatggcgctgtacatggccctcagcctgctgcgtatgcgctggcggctccgcgccgccccccgcatacaggacaatgtctatcgctgcaccgactggtctacgcctttcgtgctgggcgtgctcgcgccccgcatttatgtgccggaaaccgtgtcggagcaggactttcctcaggtgctcgcccacgaaaggtgccatatccgccgctgggaccatgtgtggaaaccgttggcatttctgctgctggcggtcaactggttcaacccggtcctctgggcggcgtatgtcctgctgggccgcgacatggagcgcgcctgtgatgaaatggtgttgaaaaacgccacgcccgcccagcgggccgcctattcccgggcgctggtggcctgtgccgcccagccgaaaatggcggcggtgtgcccgctggcctttggcgaagtagctgtgaaagaaagggtgaagaacgtgctcaactataagaagcccgccctctgggctgtcatcctgctggtcgttgcggcggccatcatcggcgtgtgcctgctgacgaagcccgccgaaaacgacgccggagtgccggacgcggagacgctgtacgccctgcggacggagtatatcggcgacaatgccgccgtcagcggcatactggacgcgctgggcttccgggcggccggcgctgccggcgatggtcaggcgtatacctactcctttgaggtcgaaacggccagcgagccctacggcgtggtggtgcgctacgcctttacaggcgcgctgccgcagcgcagcgcggagtggaaccggcagatggcgcagcggggctatatcgcgctggcactcatcgacaacgcggagtggctgcggtgggaggacatcggtgcggaaggggagacccctgtgtccggcacggtgtacgccggggactatgtggcggcggactacaacgccgtgcgggagagcgcggcgggtctgcaagcgctgatggatgttttacaggcgcgtttggaggacggctccatcgtctactatcccggcgacgccctgccggacttcacgaagatcaccccgtggcccatactgggcgaggacggcgtggtcagtgcaaaggcggaggattacggtattgtgtatgacgcggcgcagctgccggactgggagaccgttcccctgagctatctgtgcgcctactatctgaacgcggacggggcgtatgccgagggcgccatggacgtgctggcgcagcggtatagccagctgccgcagcaggtgcggaggtatatctggactctgtccgggcaggccgacccccgtgggaacggcgacgcggcggaggcgctgctgcgggatatttcccggtacataacgtcccaactgaccggcgggctgccggtgaccgtcagctacgagaaggatcagctgagcattgccgtgacggaggtctattccgtggtgtaccgcacggtgaagtacgacgagaattacagcgaggacatcccggtgtatgaggtgggcagcggcgcgcagctgtccgtgataaagggtgagggcttcaccctctacggacggtacaatgaggagaacgtggcgctccacaacggagatgtggtagagctgacggagcagttcgtgggcctgggcatggatggacagtacgctgtacggttccagtaccggagcgcggcggaaacggcggagctggaggtctatcagatcacgtgggagacgggaggttccgccaagcaggtcgtgccgctgacggaggagcaggtgcaggccatccagtcggagaagggactggtgcagccggagtggcatcaggtctgcgccaccctgcaccgcagcggcgaggacgatgtccgctattggggcactgccgattaccccgtgccgcccacggtgctgaaaatactgacggagcagtgcggctataccttcgtgacgccggaggatttccggggcaatatgacttccgccaagctggagttctacggcggcgagacgtacaccgccgccaaggccgacctgcccgccctgcagaagatgctcaccaacaccagagactacggcggcggagccgcctgctggttcaccgccaagctgacggtgacgttcgacgacgggcggacagtgtcggtgctgaaggggacggacagctgcgccagctttacgttcggctcgtggaactccgccatagtgtccgacagcgagaaccggcagttctggcagatattcggcgtgccctttgagggataaatacagcagaaaagccaccccgatggggtggcttttccatgcgtacacggtatctcagccgtggtaatacctcttggcgcagaagtcgcgctctacgcgtaccttgccggtgtcggtgagccagtcggtgaagttggtgaagttccgctccacgatgctgaatttcagctcctgccgggtgcggatgttctcccgctggcagaaggcgtatatccagtcggagaacgtcatgccgtcggtgaggtcgtccagaagctcccgctccttgcggtggatgaaggcgatgttgctgtcgatgagggcagacagctccgcgcggtcggtgacgacctgcttgtgggcgatgatataggcggggtagtccgtggcgcggagggactccttgctctccagatccctggcgacgaacatactggtgggcagcttggcgccgtcgatcagggcctgatcgatgaggcagtcgcccagataggccgcgccgtccggcgtgacaaagcccagctggcctgccgaatggccggggagagacagtacgccgaaccgggcgccgtctacatcgatgtggtcctcctgggggaagatgacccgatctgcggtgaagcactcctccagaaacagctcacggcttttgccgtaggtcagggccacgtagttggcgcggtagctgtccgggttcacagagataccggcttcgatcagggagatggcggcttttgcgccgtatcgctcctgcaaataccggacgttgccggtgtggtcgaagtgggcgtgagagcagagaatggcgcgcagacgccagccgctgccgtcgatgagcgcggtcaggccggctctgtccagcttggcgtagccggtgtcgatgagcaccacatcccggtcattgagcttataaacgggcagtagagcggtggcggcgacggccgcatatgtattgcccagcacgtgcagaagttccatgaaaatcagcctccggaaaagtgttttccctattatacaccgccggtggaaaaaaacaaagcttttcgtttttgcatcctgcgccgcaggcgcagggcacgcgggatctgcaaaaaagaattcagaaaaattttcgattttccccctatgcaaaacgggagaaataaggtaaaatacctgatagaaaattagggaggaacggcgatggagcaaccagtattcaagcgggtgctgctgaagatcagcggcgaagcgctggccggcgataagcacttcggtctggactttcaggtcatgggccgggtggcggacgttatcaagcagtgtgtggacatgggcgtgcaggtgggtatcgtcatcggcggcggcaatttctggcgcggcgtgaaggacggcgagggacacatcgagcgcacccgggccgatcacatgggtatgctggccacggccatgaactgcatggccatggcggacgtgctggagcagaagggtgtggacgtgcgtgtgcagacggcgctggagatccgggccgtggcggagccgtatatccgcgccagggccattcggcacctggaaaaggggagagtggtcatttttggctgcggcatcggctgcccgttcttctccacggataccgcggcggtgctgcgggcggcggagatcgacgcggacgtcatcctgctggccaagaatatcgacggcgtgtacgacagcgacccggccaagaatgccgatgcggtgaagtttgacagcatcacctacgacgaggtgctcaagcggcacctggctgtgatggactctaccgccaccagcctgtccatggataaccatatcccggtgctggtgtttgccctgaaagacccggagaatatcatccgcgccctgcgcggcgaaaaaatcggaacgatcgtgaaggaggactgaccccatgttgaaggacgagtacaaggtttacgaggaaaaaatgaagaagagcattgaatccgtgatgagcgacttcgacaccgtgcgtgccggccgcgccaacgcttccgtgctcaaccgcatcagtgtggactattacggtacccccacgcccatccagcagatcggctctatcggctctcctgacccgcggacgctggtcattaccccttgggatgccagcattctgaagggtattgaaaaggccattcaggagtccgacttgggcatcaacccccagaacgacggtaagtgcattcgtctggctttcccccagctgaccgaggagcgccgcaaggagctggtcaagcagatccacaagtacgccgagaacggcaaggtggctgtgcggaatatccgccgggatgcgatggataacttcaagaagcagcagaaggcatccgagatcaccgaggacgagctgaagatcgccgagaaggacctgcagaagctgaccgacgacagctgcaaggagatcgacaagatcctggacaacaaggaaaaggaattgatgtctgtttaatgggactgtttacgaagaaaacgccccatacggcgggggaggtggacaggagccgccttccccgccatatcgctgttattatggacggcaacggccgctgggcgaaaaaacgcggcctgccccgcacggcggggcacaaggcgggggcggaggtgttccgcgacatcgccacctactgcaagaaactgggcgtggaatacctgacggtatacgccttttccacagagaactggaagcggcccgccgatgaggtgaataccatcatgggcctgctggagcagtatctgcgggaagctatcgacaccatggaaaaggagcacatccgcctgcggttcttcggcgatctcagcgcactgtccccggagctgcaggcgctggcacatgagacggacgacatctccggccgctatgcggggttccaggccaatgtgtgtctgaattacggcggcagggcggagatactgcgggcggcgcggctgtgcgcggagcagggggtggactggacggaggagaacctctccgccaatatgtactctgccggtatccccgacccggagctgatcatccgccccagcggcgagatacggctgagcaatttcatgctgtggcagtgtgcctacagcgaattctatttctgcgacacgctgtggccggattttacccggcaggatatggacagagcgatcatcgactatcagcggcgggatcgccggttcggcggcgtaaagtgaggtgacgaccatgaaacagagaatactggtggcgatcatcggcgtgccggcattgatcggcgtgctgtgcttcgcaccggattgggccacagcggtgctggtggcggcgctgtgcgtcatcggctgccatgagttcatggcggccgccgcgccggagaaagcggcgcactggtgggggctggcggccacgctggcggtgttcaccgtgttcacggtgtatttcagcggcggtgacttcacgggtaccgccatacatacgatcatggtatggctgctggcggcgctgatcgtggtgatgttcatcgcggcggtgcaggccttcggcaaagacgacgagctggattttccggatatcagcgctatggcggtgtccggattggtgatcccgctggcgctgggctgcctggtgcggctgcggatgctggaatacggcgccggactggtgctgatcccgctggtgtcggcgtttatgagcgactctctggcgctgttcggcggtatgctgttcgggaaaacaaagctggcgcccagagtcagcccgaagaagacacgggagggtgcggtcagcggcctggtgggcggcatggtgggaatgatcctgttccggatattcttcttcctatgtacggaggtgcagctgcacatcggctggtgtgtgctgttgggcttcgtgggcgcggtgctggggcagctgggcgacctgagcttctcctgcgtgaagcggcagtgcggcatcaaggactacggacggctgctgccgggccacggcggcgtgctggaccggttcgacagtgtgatcttcgctgcaccggtgacgtggatgcttatcaacgctgtgacgctgtattgaggaaggacctatgacgaaaaccatcgccctgttgggggctaccggctccatcgggcggcagacgctggaggtggccggggagctgggcctccgcgtggcggcgctgaccgccaatacacaggtagacctgttggagcagcaggcgcggcagtatatgccgcgccttgcggtgctgtatgacgaaaatgcggcgctggcgctgaaaaaacggctgcgggggaccggcattgaggtcatggcaggggaggagggcctgttggctgccgccgctatgaccgaggcggacacggtggtgactgccgtgatgggcagcgtggggctgcgtcccacactggcggcaatccaaaaaggcaagcgcatcgcgctggccaataaggaaacgctggtgtgcgccggtgagctggtgatggacgcggcggagaaatacggcgcggagatcgtgccggtggacagtgagcacagtgcggtgtttcagtgcttgcagggctgccgggaccggggtgaggtgcggcgtatcctgctgacctgctccggcgggccgttctacggaaggaccttcgacgagctggagcacatgacggcggcggatgccctgcgccatcccaactggcacatgggaccgaagatcacggtggactccgccacactgatgaacaagggattggagatcatcgaggccatgcggctctatcgcctgccggtggagcaggtgcaggcggtgatacaccgccagagcatcgtgcattcgctggtggagttccgggacggggcgctgctggcgcagctgggcacgccggatatgaagctgcccatccgctacgcgctgacgtatccctaccgggccgagagcccggataagccgctggacctgctgacgtgcggcgcgctgacctttgccgagccggacgagagggcgttcccctgtctgcgtctggcacggtatgccgcagcggtgggcggcaccgcctgcgccatactcaacggcgccaacgaggcggccgtgggaatgtttctgcggggtgagatcggctttaacgatatctcccggcgggtggagcgcgcgttggagcgggtgccggtgcaatatcagccaagccttgcggatatactggaagcagacaaggcggcgcggcgcgctgccctgtgacatccggaaaaggagcttgcatacatgatcgtatatatcatagcggccctgctggtgttcggtattttgatcgccgtccatgagctggggcattttctggcggccaaggcctgcggcgtgcgggtcaacgagttcgccatcggcatgggaccggtgctgtggaaaaagcagcggggggatacccagtattctctgcgggcttttccggtgggcggtttctgtgccatggagggggaagaggaggactctgacgatccggcggcgctgaaccgccaggacttttggaaaaagctgatcatttttgccgccggcgcggccatgaattttctggcggggcttattatcatcttctgcctgtatgcgccggcgcaggggttctatcagccggtgatctccggctttgccgagggttgtccgttggagagcgccgacggcttgcagaccggggaccggctggtgtccatcgatggggagcgcgtgtacatttacagcgacgtgagcctgctgcttggcctgaataagaccggcacattcgacctggtggtggaccgcggcggggagaaggtgcgcctggacgactttgccatgacgagacagacgtataccgatcaaagcggaaatgcgtacagcggctacggaatatacttcggtgcggcggcggccaccttcggcgacaaactggcctacacctggaacaatgctgtggatttcgtgcgtctggtgcggctgagtctgcaaatgctctttaccgggcaggcgggcctgcgggacctgagtggcccggtggggatcgtgtccaccatggtacaggtaggtgagcaggcggagacgacccaggcggcggtggagaacatcgcctacatcgcggcgctgatcgcagtgaatctggcggtgatgaacctgctgcccctgccggcattagacggcgggcggatattcttcctgatcatcaacgcggcagccatgctgctgttccggaagcagataccggcaaaatatgagaactatatccacttcgcgggacttattctgctgctggcgctgatggtggtgctggtgttcagcgacgtgggaaagctgatccactgaggaggcggggacggtgacaagacgcatacaggtgggcgcggtaccggtgggcggcggcgcggccgtaagcatacagtccatgtgcaatacgcccacggaggacgtgaacgccacggtgcggcagatacagcgcctggagcaggcgggctgcgagatcgtgcgtgtggcggtgcccacggaggaggccgcacgggccattccgagcatcaaggcggctatacacatcccgctggtggcggatatccactttgattaccggctggcgttgctgtgtgtggacggcggtgtggataaaatacgcatcaaccccggcaacatcgggtcgaaggaccgcgtgcgggccgtggccgacgcctgccgggagcggggcattccgatccgtgtgggcgtcaacggcgggtcgctggagaaggacctggtgcaaaaatacggcggtgtgaccgccgaggcgttggccgagagtgcactgggccatgtgcgcctgttggaggagtgcggcttcggggatatctgcatctccgtgaagtgctcccgggtgccggtaaatatggcggcctacgagctgctgcacgaaaaggtggactatccgctacatctgggcgtcaccgaggccggcacaccggagatgggggtgctgaagtcggccatcggcatcggcggactgctgtgtcggggtatcggcgatacgctgcgggtgagcctgactgccgacccggtggaagaggtagtggccgccaagcgtattttgcaggcctgcggtctgcggcagacggggccggacctgatcgcctgccccacctgcgggcggacgaagtatgatatgctgcccatcgcccgggaggtggaacggcggctgaagaactgtgacaagcccatcaccgtggcggtgatggggtgcgtggtcaatggaccgggtgaggccactgctgcggatgtgggcatcgccggaggcaagggcgagggattgctgttcgctaagggaaaggttctgcgaaaagtgccggaggaccagctggtggacgcgctgttcgaggagatcgacaagctgtaacaagagatacgataggggagaaacatggcggagagagtaccgttttttacgctgtttgagagctttcaggcgccgcggcagctgcgcctgctgctgcacgatgcctgcatcatcagcggcgcgctggatatggcgggccggacgctggaggtgcagatagagagcagtgagacactgccccagacggcgcaggacgccctgcagcagatgctggcgcagcagtatgatctgcggcaggtgctgctgcatttctgcggcaccggcgagcaaaagggcgacaacggggtgatctggggcaagacgatcaccggaaagctgacgcctatcggcgaactgaatatcaagcagggcagcgccattgtggagggccgggtattcaaggcagagtgctatgagacacggcgcaagggcatgtggacgctgaacttcaacatcaccgatgagcgcggctccgtggccgtgcggaaggccatggatgaaaaagaggccaaggtgctgggcggcgcgatcaacgacgggatgtggctgcgcctgcagggcaaggtggaactgacctacgacgggaaggatatcctgctgcggccggtgaatattatgaagatcagccatacggcccggcaggacaatgcaccggagaagcgggtggagctgcacctgcatacgcagatgagcagcatggatgctctgacggatgtgggcaaggtggtaaagcaggcggcagcatggggccacccggctattgccattaccgaccacggcacggtgcaggcattcccaaaggcgcgggacgcgggcaaggggaagatcaagatcctgtacggcgtggaggggtactatgtcaataacctggacgaccgcattgccgtacacggtgcgcaggatcaggactttgacgacgagatcgtgtgcttcgacatcgaaaccaccgggttgaaggtacagcgggaggccatcacggagatcggcgcagtggtgctgaaaaacgggaagatcacggatacgtttcagaccttcgtgaaccccggccgtcggctgacgccggagatcatcggcctgacgggcattacggatgccatgctggcggacgcgccgccgccggaggaagcactggcggcgtttttgaaattcgtggacgggcgaccgctggcggcccacaatgcggagttcgacattgggtttatccgggccggatgccgcagggcggggctggaattcgaccccacgtacatcgacagcctgatcctggcgcagaacctgctgccggagctgcacaaacataagctggacatcgtagcggagcatttggatctgcccgccttcaaccaccaccgggcgtcggacgacgcggggatggtggggtatatgctgatacccttttttgagagaatgcggcgggagatgggaatttcccgtctgcaggagatcaacgggcagatggagaagctgcggccccggggcggcggcagccggcaccccaagcatattatcatcctggcgaagaacaagctgggtctgaagcatctgtatcagctgatctcagcttcaaacctcaagtatttcaagcgtgtgcccattatccccaagacggagctgatcgcccatcgggagggcctcattatcggctcagcctgtgaggcaggcgagctgttccgggcggtggcggaccgcaaggactgggcggagctgaagcgcatcgcatcgttctacgattacctggagatacagcccatctgcaataatatgttcatgcttcgcaacggcgcggtgcagtcagaggaggagctgcgggagttcaaccgtactatcgtccggttgggccgggagctgggcaagccagtgtgcgccaccggtgatgtgcacttccaggagccggaggacgaggtataccgccatatcctgctggccagcaagaagtttgccgacgccgacgcacccctgcccatttacttcaagaccacggaggagatgctggcggagtttgcctatctgggtgaagaggaagcgcatcgggtggtcatcgatgacccgcgcggcgtcgccgaccgtatcgaggagatcgagctgctgccgccgggacggttgttcccgccgcggctggagaattcggagcaggaacttcatgacagagtgtgggacaagtgtcacgagctgtatggcgacgagccgcctcagctgatcgtggaccggctgaacgtggaactgaaaagcattctgggcaagtacgacgtggtgtatatgtccgcccagaagctggtgcagcgcagcctggaaaacggttatctggtgggcagccggggcagtgtggggtcctcactggtggcgtatatgtccggcattacggaggtgaactccctgccgccccattatcgctgccccaaatgccgccatactgagttcatcaccgatggcagctacggctgcggcgcggatatgcccgataagaattgcccgatgtgcggggcaaagtacgctaaggacggatttgacatcccctttgagacgtttttgggctacggcggcggtaaggtgccggatatcgacctgaatttctccggtgagtaccaggcccgggcacaccagcacgccatcgagatgttcggcaagacccaggtgttccgggcggggaccatcggtaccctggcggaaaagaccgccttcggcatggtgaagaaatacctggaggaacggggcgagacggcctccaacgcggagctggatcgcctgacgctgggctgcgtgggcgtgcggcgtactacggggcagcaccccggtgggctggtggtggtgccggatgatatggatgtggaggattttaccgcggtgcagcacccggcagacgatgccaacagcgacactgtgaccactcatttcgagtatcactgcatggaggacaacctcctgaagctggatatgctgggacacgatgaccccaccatgatcaaaatgctggaggacctgaccggcgtgaacgcgcgggccatccccttggatgacccggataccatgagtattttcacctcgtccaaggtgctgggctttgaaaatgacgagatactgggtcccaccggcgccgtggctatcccggagttcaacacccggttcacccgcggtatgctgatggataccatgccccaggatttcaataccctggtacggttgtccggcttctcccacggtaccgacgtgtggctgggcaatgcccgggacttgatcgtgggcggcacggccagcgttttggagacggtgggctgccgcgatgatatcatgttgtacctaatctccatggggctggagccgaagatgagctttaagatcatggaggcggtgcgtaagggcaaagtaaagaaaaagggcttcgaggacggctgggaggaggctatgcgggagcatcaggtgccggattggtatatcggctctctggccaagatcggctatctgttccctaaggcccacgctgtggcctatgtgatgatggcattccgcatcgcgtggttcaaagtccaccaacctctagcattctacgctacgttcttctccatccgggccaaggccttcgacgcggagtactgctgcgccggcatggatgcggtgaagcagaaaatcagggagatcgagaacaataaggacgccaccgacgtggaacagaacctgctggtgacgctggaggtgtgctacgagttctatctgcggggcttccattttgacaccattagtatttacgactccgatgccacacacttcaagatcacggaaaacggcctgctgcctccctttgtaacggtgcgcggtctgggtgagacggcggcgctggacacggtggagaagcgaaagggaaaaaccttcatctctgtagaggagttcgccaccatctgcaacaagcttagtaagacccatatcgagcagctgaaggcgctgggtgcctttgccggtatggcggataccagtcaggtgacgctgttctgagacagccaaaagcgcaaaaaagaagcacccgagcgggtgcttcttttttgcactttattcggctttctgtttcacggggaagtcgatctgggccagaagaacggcggcgaacatcacggcgcagccgatatactcgcggacggacatctgctgcttgagaatgatggcaccggcgatgacggcgaacacactctccagactcagcaggatggtgaccaccgtggggttggaacccttctgcgccagaatttgcagggtgtagcccacgccgcaggagaagatgcccacgtacagcagaggaaggatgcagctccagatggcggcgaagtccacctcctcaaagaggaacatacacacggtggagataacgccggcaaacaggaattgcagacagctgagctttacgccgtcacagtaggcggtgaaatggtcgatgaccagaatatgtaccgcgaagcacacggcgcagatcaagattagcagatcgccgggggaaagggagaagctgcccttgatgcatagcagatacagcgccagtacagacaaggccacggcgatccatacgggaaggctgaccttccgcttgaagaacagaccgaacacgggcaccagcaccacatatagggcggtgatgaagccggccttgccggagtcagtgccggccaccatacccgcttgctggaagttggaagccatggccagcgccgcaccgcagcacaggccgcccagccacagctgccggttggcggcctttttctcggcgggggagaggacgggcttgtcctttttcagcttgtcgctgatgacgatgaccaccagcagcgccagcaccgcgataaagtagcggctggcgttgaaggcgaacgcgccgatggagtcggcgcacatatcctgcgcaacgaaggcggtaccccagatgaaggcggccagaatggggaaaaccacctgccgcatctgattgtgtttcatgtcagtgatgtcctttctctgtttactctttctctttcggtgcgccggcgtgccattggaatttgcgttcctgatgatgcagcaggcgcgtgatattctcccggtggcaccagatcaccagcgcggcgatcagcacggccagcgccgtgtagaggaggctgcggccgcagaagaaaaatgtggtgacgggcatggaggcagcggcgcagacggagccgagagagacatatctcgtcagcaaccacagggcggcgaacagaccccacgcgatcagaccgacacgccagtccagcagccacaccagcgtgccgccggacaggatgcccttgccgcctttgaagccgaagaacaccgggaacatatgacccaactcacagccaaggccacccagcaggacgcccagcctccagtcgccggccagatagtcgaaggctgcaccgccaatcaggcaggcaatcactgttttacccatgtcgaagaggatgacacccagtgcgtatttggcaccgtaggtgcggtagaagttggtcaggcccgcattgccgctgccgtgctgccgcacatcgtccttgatgatgaagtggctgaccattaccgagccgttgagacagcctaagaaataacccagcagcaatatgaccagtgaggccagcagtatagcgccgatgagatggttcaaccgtcgtcctctcccttctggcggatagtcagcacgatgggggtgccctccaggccgaacacgctgcggagctggttttccagataccgctggtaggagaagtggaagagctttttgtcgttgcagaagatgacgaagtggggcggcttgacgcccacctgcgtcatgtagtagatcttcaggcggcgccccttgtccgtgggtggctgaacgcgggtctgcgcgtctgccagcacactgttcagcgtgccggtggtgatccgcatggccgcctgatcgttgacgtagttgatcagctcaaagagacggcccacccgctggccggtcagggcggagatgaacagaatgggggcatagggcatatagctcaggtcccggcggatgtcctcacgcatacggtccatggtcttgtcgtccttttcgatcaggtcccatttgttcaccacgataatgcatgccttgcccgcgtcatgcgccagaccggcgaccttggtgtcctgctcggtgacaccctcctgagcatcgatgagaatgaggcagacgtcgctgcgctcaatagccatggtggcccgcagaacgctgtatttttcgatgttgtcatctaccttggactttttccgcataccggcggtgtcgatgaaattatatttgccatactggttctcgaagtagctgtcgatggcgtcgcgggtggtgccggctacattgctgacgataacgcgttcctcgcccagaatacggttcgtcaagctggatttacctacattgggctttccgataatggccacctgtaccacgtcggagtcgtcctcctcatccgtttccggcggaaaatacttgatgcattcgtccagcagatcgccggtgccgtggccgtgaacggcggagacagccacggggtcgcccagacccaggttgtagaactcatagaaatccgggtcgaccgcgcccacagagtccatcttgttcaccgccagcacgatgggcttacggctgcgctgaagcatactggccacctcctggtcggaggcagtcaggccggtcttgatatccgtgacgaagataatgacgtcggcgttgtcgatggcgatctgggcctgctcccgcatgaaggacagaatttggctgtctgtattgggctcgatgccgccggtgtccaccaggcggaacctgcgtcccacccactcgctctcaccgtagatgcggtcgcgggtgacgccgggggtgtcctctacgatggacagccgccggccgatgatcttattgaacagcatggatttgcctacattgggccgccccacgatagcgatcaaaggcagtgccatagtttattcctccctatccagcatggcgtccaagaggtcgccgccgtctatccccacgatctgcaccgggcagcccagctcagcgctgagacgatccacggtgtagtcgtccaaaaatacgttttcgccgtgccgcagcatgtgcagcggcagcagcacccggcccagatccgggaccttttgcagctgcgccgacaggtcctgacctgtcagcagaccggctacgtcgatggtgtggccgaaaaagtcgttctccacggcgatcacttgtccccgcagcgccgggaaccaagcgctggcttgctccagcagatagcgcataaaaggggcggcggcagtgccggtggcgacggtaaagggtgcaggggcctcgtcgtggtcctccagccgtatggcgctgagaaagtcctgctccagtgagcgcagcatacccacgccgttttccagctgccgatagccctcgtagtagtcctcttggggcagatccagtccggcccgcaggaacagttcgtcagcacagaagaacctacgggtgccgaagcggcgcagattttccagcccgaattcctcggcgatggcaatgatgtcccgggcacagtccctgtccacgggccttagcttggccagaccctggcggtacttggtgatacccaccggcacaagagagcagctggagaactgccactcggtcaagtcccgcagggtgcggcgcagttggtcaccgtcgttccagccggggcaaaccacgatctgcccgttcatgacgataccggccttgcagaaggcctggatatagtccagcgaccgggcggcgttcttgttgccaagcatggtgcagtgcagctgtgggtcggtggcgtggacggagacgttgatggggctgatgtgcaggtcaatgatccgctgtgcctcccgctccgtcaggttggtgagggtgatgtagttgcccagcagaaagctcagccgtgcgtcgtcatccttgaagtacagcgtggagcgcatacccggcggcatctggtctacaaagcagaacaagcagtgattggcacaggagcgcatttcgtccatcagatatgtgtcgaagttcagccccaggtcctggccttcggccttgcggcaggtgacgtgccgcacgttgcctgccgccgttttcagctcaaggtgcgacaggggatcatagccgtaaaaacgatagtccagcacatccacgatggggtggccgttgatggatagaagctgttcgcccacctgaacgccggcgcgctccgcggggctgtgccggtcgatggcggtgatgatggtactcataatacgtcctcactcatgcaaaatgcggccttatccacaataggacataataccacataataatcaactcattataccgttttttgacgtgagacgcaagcacaatatagtatagccgcccacgagcataaagtaaaacgatggattttgatacttcccatgacgaaaagtgtgggagcagtaaaaaacaagagggaagcggcgcttccctcttgcaaaggcacaacagaacttatttcgcggccacagacttgacgaccttgacctcgcggccgttgtagctgccgcactccgggcacattctgtgggggagatgcagcgcgccgcacttggcgcacgccaccagcgtgggagctgccagcttccatacggaagaacgtctcttattgcgtctttgcttggatacttttcccttagggactgccatgttgacacctccttggtcttaattgcctgagcagcaatgtaataaaaagtaattcactcatccttctgcagcaactgcgccagcttcgccagacggggatccactgcctttttgcatcggcagctctcccggttcaggttcacaccacagccggggcacagccccttgcagtcctctgagcagagaaacttcgtgtccatatcgaggataaaggcgtcgcgcgccaactcctccacatccacctcgtcgttatccagcaggatgatgtcgtcgctttcgtcagactcacgcgcctctgccaatacgcagccgtagcgtgtcgtcttgtccgcgtcgtacgcttcaccgcaccggtcacagatacaatgcagcgtggtggtcaacgtcattccgcacagcagcagcccagccttattctccagccggcagtccacaacaaccggacgggaaacgggacaagaaccaccgaattccaagtcggacagatccatttcaaaacggatgtcctgccgggcatcgggggtatgcagcagcttgttgacgttcaaacgcatagtacacctcacaatggcacgtgtagtattatagccgacacaaaatgccttgtcaaacattttcttacaaatattttgacttttttcaaaaacacggtacaataagcagagaaacacaggggaggacgccgttatgcgggaactgaccatcggaaaaaatgacgccggacagcggctggatagatttctgtccaaggcgctgcccctgctgccgcctgctctggcgcagaagtacatccgcatcaagcgggtgaaggtaaacggcggacgtgcccagcgggaccagcggctcagtgcgggcgatgtgctgcaattatacatcaacgacgagtttttcgacaagccctcagaggaaaatctgtttctgacgctgttcaagccgcacctgacggtggtgtacgaggatgagcacctgctgctggcggacaagccgcagggaatggtggtccacgccgacgagacggaaaaggtgaataccctcatcaaccacatccaggcatatctgtaccagaaacgggagtggaaccccaagtgggaaaatgcctttacgccggcactgtgcaaccgcatcgaccgcaataccggcggcatcgtcatcgcggccaaggacgccgagacgctgagggtcatcaacgagaagatacgggaccgggaaatggacaagcgctacctctgcattaccgcgggccggccgaaaaagccggaaggccgggtggagtgctttttgctgaaagatgagaagaaaaagcaggtgtccgtgtaccataagccgatccccggcggaaagaccgccattaccgattacaaggtgctggagacgcggggagagctgagcttggtggagatcgggctggagacgggccggacccaccagatccgcgccacgatggcggacctgggctgcccgctgctgggggacggcaaatacggccgtggggacgtaaaccgccgctacggcgagacgcggcaggccctgtatgcctacaagctgacctttgacctgcccacggacgcggggcacctgaactatctgcgcgggcagagctttacagtggaaaatgtgcccttccgggacaaatatttcggctgagtgccgtgcagcggatggcttttgccatccgctgtatttttttcggggaaaaacggaaaaatccattgactttcccagcgcttttatatatagtgtactcgccatctttcgacagaaacgagcgcgtgaacagacgcgctgccgccgcgtcgaaggggggctattttactgatgaatggaggaggataaatgtccaaagagttgattcgcctgcgggatctctgcatggcgtttgacgacgagctggttctcgatcacatcaatctttacatcaacgattccgaattcctcacgctgcttggccccagtgggtgcggcaagactaccacactgcggatcatcggaggtttcaccacgcccacaagcggcgacgtgaccttcgacggcgagaggatcaacgatgtcccgccccataagcggcagatcaacacggtgttccagaaatatgcgctgtttccgcatctggacgtgtttgaaaacatcgcctttggcctgcgtatcgcaaaagtgccggaggacgagatacgacagcgtgtcggtgaaatgctggaggtcgtcagcctgaagggctttgaccgccggcgtgtcgaccaactctccggtggtcagcagcagcgtgtggcgatcgcccgcgccctggtgaaccggccgaaggtgctgctgctggacgagccgctgggcgcgctggatctgcgtctgcgtaaggatatgcagaacgaactgaaacgtatccagcagcagatgggcatcacgtttatatatgtcacccacgatcaggaggaagccctgaccatgtccgacaccgtggtggtcatggacaagggccgcatccagcagatcggcacaccggaggatatctacaacgaaccgaagaatgcctttgtggcggacttcatcggcgagagcaatatcctcaacggcacgatggtccgcgacagggtcgtgaaaatgtacggcaaggaattcccctgcgtggacggcggcttcgccgaaaatgaaccggtggacgtggtcattcgcccggaggatatcgacatcgtgccggtggagcagggccagttggtaggcactgtcaccaacgtgacgttcaaggggatgcaatatgatatcatcgtggatttccgcggcttcaagtggttgatccagaccaccgatcactctccggtgggtgcccgtatcggcgtgaagatcgatcccgagggtttccacattatgaagaagagcgagtattccggtatgttcggcgactattcctcttactccgaggaatacgaggaactggcggacgccggtgctgagccggaagaggaggagagcgaggatgaagagtaagctctcccgtttcgccgtgccctatgtggtgtggatggctatttttgtagtagcccccattgtcattatggtggtgtatgcctttgccggcagcgagggcggcttcacgctggacaactttgtccagatgggcggttacgctgccgtgttcggccgttccttcaagctggcgctgattgccacggctatctgcctgctgttgggctatcctgtggcgtaccttctcagccgggagggcgagcgcttccgccgcacggccatggtactgatcatgctgcccatgtggatgaacttcctgctgcggacctactcctggatgaccatcctggagaacaacggcctgctgaaccagctgttccagaaactgggtatcattgccctgtacaaccatctgacaggcagcagcctggagtattttaccatgatcgacacccagggcgctgtggtgctgggtatggtctataactacctaccctttatgatcctgcctatctactctgtgatttgcaagctggattactccctgctggaggcagcccgcgacctgggggccaacaccgtcacggtgttccgcaaggtcatcctgcccctgagcctgccgggcgtgctgtccggcatcaccatggtgttcgtgccctctgtgtctacgttcgccatcagccgtatgctgggcggcggcacggagctgttgctgggcgacctgatcgaacggcagttcctgggcggggcgtataacccgcagctgggcgcggctatttccctggtgatgatgctgatcgtcgttgtctgtatgctggtgatgaaccgctttggcgagggcgaggaacaggcggtgatgctatgagacagagaaagggcaactccgtcggcgatcgcctgttgatgatcctggtgggcctgttcctgtacgcacccatcatcatcctgatcgtcttttccttcaacgccggcaacagctccagtgtgtggaagggcttttccctccactggtacgccgagctgctgaacgaccggctcattatgcacagcgtgtataccacgctgctggtatccttgctggctaccgtcatcgccaccgtggcgggcacctttgccgctatcggcttttacggtatgcgacgccgggcgcgcaccgggctgatggccgtgaacaacattcccatgatgaacgcggacatcgtcaccggcgtcagcctgtgtctgctgttcgtggtattcttcaacggatggcatagctttgccgtgtgggtcaacggctggcagtcactggtggtgctgcctgagcgactgaccctgggctttggcacactgttgatcgcccacatctgcttcaacatcccctacgtcattttgtccgtagggcccaagctgcggcagatggaccgcaatttggtcgatgcggcccaggacttgggctgcacctggatgcaggccttctggaaggtcatcattccggagatcaagcccggtatcgtctccggtgcgctgacggctttcactatgtccatcgatgatttcatcatcagctacttcacggcgggtacgtcctcctccacgttagccatgaccatctacggcatgaccaaaaagcgcgtcagcccggagatcaacgccgtatccacgctgctgttcgtcacggtcatcatcctgctggccatcatcaacctgcgggaaaaccaccagcagagccacagccgccgccatgcggaggccgccgctcctgcgccggcgccgaaaaagcatcccggcctgggcaagaagctggccgcgggcgctatggcctgtgtgctgttggcggtactgatcgtcaccggtgccgcggcccgcagcgagcgcgtggtcaatgtgtgctcctggggcgagtatatcgatgagtccctgatcaccgaattcgaggagaagaccggcatccgtgtgaactaccagaccgccgagagcaatgaggcgttgtactcccttatcaagatgggcggcgcggacttcgatgtgattgtaccctccgactatatgatcgcccggctgatccaggaggatatgctggcggagctggactacgccgccatccccaatttccaactgatggacccccagtttacccatctgagcttcgacccggagaataagtacaccgtaccctacacctggggcagcgtgggtatcatctacaacacgactatggtggacgagcccatcaccagctggggcgctatgttcgacgagaagtacgccggacaggtgctgatgatcaacaactcccgcgacgcgctgatggccgccctgtgctatctgggctacgacatcaacaccaccgatgagggacagctgaccgaggcctttgagctggtgaagaatgccaaagacaagggtgtgtatcaggccttcgtcatggacgaggtcttcggcaagatggagggcggcaatgcggccatcaccatgtactacgccggcgactatctgaccatgctggagaataacgaggacctggccttcgtcattcccgaggagggcagcaactggttcgtggacgccatgtgtgtgctcaagtccagccagcacaaggccgaggcctatgagtggatcaactttatcgcctctaccgacagtaacctggccaatatggactacatctggtatgcctctcccaatgccgaagcgctggcggagtatcccgcttactacgaggagacgtatggtgagccgctggacgaggagatctacaacatcatggccattcccgatgaggagcgcgagcgctgtgagatctatgtcaacctgccacaggagacgctgaagttctacgataagttgtggacacagttgggcgtctgacattcgcggtttttttccgccccgcgtataggcaagaaatgtatttaaagaaaagcgcttaattggaggaattgctatgatcgaagtaggtatgacctataccgctgaaaagaccgtcaccccggatatgaccgccaaggctatcggttccggcgggctggaggtgttcggcaccccctttatgatgggactgatggagtacgccgctatgcagtgcgtgcagccggagctgccggagggcaagggcaccgtgggcgtggagatcagttccagtcacctggcgcctactcctgtgggcatgaaggtcaccgccactgccgaggtgacgggtatctccgccaacggcaagatgatcaccttcaaggtcacggcccacgacgccgatggcctgatcggcgagggcacccatacccgcgctgtcatcgacaacgcacggtttttgcagaagtgcaatgacaagctggcacgcgtataaaccacaaaaagccgcccgtaggggcggcttttttcttgtcacgggcagctatatttggtataataaaacgatactatgaccgggggaggggagagaacgatgcgcgttttggccacgatcgggttttccttctctgccggtgtcttcctggcggcactgttgccctggaacggctggcagctgtatgccgccgggggcgttttgctgctggcgcttgcgtggctgtttgctgcacgcaaacaaaaatattttcgccgggggctgctgatcctgctgccgctggcggtatcgctggcctattttgccgggtatgaccacctggtgcgccagccgatagaggaccgctgtggtgcggcgtcggactttaccgcaaccgtttgcgattggccgcaggccacggagcgcggcgccagggtcacggtggagctggagggctatcatcgggccagggccgtgctgtatggcgaagcggagctgctggcggcccgaccgggtgacacggtcacgggcacggcccagtggcagtctgccgcccatttcgacagcgatgatgtgacccattttaacgcccggggcgtgtatgcgctgctgtatggccgtgaggatgtgcgtctgtcggcgggtgatagggatgccctgcgctggctgccccagcgggcgggcaaagctttccgcgagaaggtggccgctatctgggatgacccgcgtgtcagcggatttctgacagcggagcttaccggggacaagtccgctatggacgacggagactatctggccatgcaggagacgggcctggcgcatctgttcgcggtgtccggcctgcactgcgcttttctggtgacgctgatggcgttgctgatctcccggcggcagagactgctgtgcgccgtgaccattccgctgctgctgttttacatggtgatggtgggcatgagcccctcggtggtccgtgcctgcatcatgcagatattcctgctgatcgcgccgctgttccggcggggcagtgaccctctgaccagcttggctgccgcactgctggtgatcctgctgtgcaatccctttgccgcggccagcgtcagcttgcagctgagcttttccgctacgctgggtatggtgctgctgtcaccccggctgtacaagctgctgaccgggtggtataagggaaaatgtcggccgctgcggaccgcgttgtgcttcgtcgcggcgaacctgtccgccaccctcagcgccgtggtgttcactgccccgctgacagcctggtatttccgcattttcgtgctggtagcaccgctgtccagcttattggcggtgcctgcggcgggatggagcttcatggctgcctttgtgacggtgctgctgggctttgtgtggctgccgctggccagcctgctgggttggatatcctgggcgctggtgcggtacatcctgtggatcgccaacggcatgatgtcctggcgctatcacgcggtgtatttcaccaatccctatctcatctactggctgctgtttttgtacgcggcctttatcggctgtgccgccacgccggacggcaagcggaaatacctgctggcatcggcattgtcggtgctgacgctgacggcggccatctgggtcaaccgtcaggactatcagtacggcgtactgaccgccctgacgctggatgtgggacagggcgagagcgtcattctgacctccggcggtgagacggcactggtggactgcggcagcagcaacagctataaagaccccggcggtctagctgccgacacgctgcacagcatgggcgtccgggaactgagcgctgtggtggtgacccactaccacgccgatcacaccaacggtttgtacgaggtgctgcgccgcatcccggtgcagacggtctacctgccggacatcgaggatgagtatggcgttcgggagcgtctggtgtcgctggcggaggagaagggcgcgcaggtgacctatgtgacgaaggagacggccgatacgctgggcgataccgttttgaccatctatccgccggtgcagtccggcggcgatctgaacgagctgggcctgacagcgctggccagtgccggagactttgatctgctcattaccggcgatatgtccggcagcaccgagaaaaagctggtggaaacctatgccttgccggatatagaggtgctggtggtcagtcaccatggctcccgatatagctcaaatatacgctttttgaagtcggtgacgccggaggcggcggtcatcagtgtgggcgacaacaactatggccacccgtcggaggagacgctccagcggctgctggcagttggggcggatatctggcgcacagaccagcagggaaccatccgcatcaccgtgaacggaggatagcatggcaaaggagaaaaaagaaaagacccccggttatgaggaattccacgacgcgctgcaaagcggcgccgtgaggaatgtctatatattccacggcgaggagacgtacctgatgcagcaggcggtggcggagctgcaagcacggcttgtgccggcgggctttgaggagttcaactatcacaggcttgcaggcaagggcctgactatgcaggaggtcgtcgaggcggcggaggccatgcctatgatggcggagcgcaccctggtcacggtggaggatatggacctgttcaggctggacgaggcccagcggggtgcgctggtggcgttgctgggggacttcccggtgtactgcacgctggtgtttttgtaccggcagataccctataagaccgacgccaagctgaagaagctcaccgccgccctggcggagcgcgcccaggtgatcgagtttgcccagcagggccagcagaagctgcaaaagtgggtgcgccgccgttttgccgctgccgggaaggaaatcgatgcggtcacggtagaccatctgctgttcacctgcggcagcctgatgaccggtctggtgccggaaatcgccaaaatcgccgcctatgccaggggagcgaaaatcacagcggcggatatcgccgctgtggcggaccctgtgctggacgcgcgggtgttcgacatgacggacgcagtggcggctcgtgactatgacaaggcggcggaatgccttgcagagctgctgcggatgcaggaggaacctatccgcattctggcggcattgggaaagacgctgcggcagctgtacacagcccggctggcgatcgacggtgacaaggacgtgctgtggctgaaggatttgtggcgcatgaagtccgattacccggccaaaaagctgatgcagtcagccagaggcgtgcggcgcagttggtgccgtgaggcggtgaagcgctgccagacgctggatcatcgcatgaaaagcgaacgaaacatggacaatgagggcgaactgaagctatttctcatggaactggcaggtgtgaagtgaagccgagggtcagggaagtcatcgtagtagaggggcggtacgacagaaatacgctcctgcaggcggtggacgccgccgtggtggaggtgggcggcttcgccctgttcaacgaccgggagaaggcggcgtatctccgccgtctggcggaggcgcggggcgtgatcctgctgaccgacccggacggcgcgggcttcgtgctccgcagccacctgaaggggctgctgcccccggacagagtaaagcaggcgtatgtccccgacgtgtacggcaaggagaagcgcaagagaaagccggggaaggagggcaagctgggcgtggaaggtatgacgccgcaggtgctgacggacgctcttcgccgcgccggtgccaccttcgagggggaggacgcaccccgccgctccgccggtattacgaaggcggatcttctggacaagggactgatcggccccggctccgccgaaaggcgggcaacgctgcaaagggagctgggtctgcccgcacggctgaccgccaacgggcttctggaggcgttggatatcctgctgacccgggaggaatttgacgccctgtgagttttttgcaggagggagggcaaacctcttgcaattcccctcatgggcggttataattaaaaattgcttttgcacaatattacgacatacaaggagtgtgagaaagatcatggccgaggaaatcaagacccccgaaacggaggagtccggcaaaaacttcattatcaatttcatcgacgaggacatcgcagagggtggtcagttccagggaatgaccgtccacacccgtttcccgccggagcccaacggctatctgcatattggacactgcaaggcgctgaccatcgacttcggcaccgccgagcggtataatggcctgtgcaacctgcgtatggacgacacgaaccccaccaaggaggacgaggaattcgtggaggccatcaagcaggacatccactggctgggcttcgactggggcgatcggttcttctacggcagcgactactttgaggaggattaccgccaggcggtgctgctgatcaaaaaggggctggcctatgtgtgccagctgacaccggaggagttcaaggccaaccgcggcgacatcggcatccccgccgtatcgccctaccgggatcggcccatcgaggagagcctggacctgttcgcccgtatgcgggccggggagttccccaacggcgccatgacgctgcgggccaagatcgacctggccagcggcaacttcaatatgcgcgatccggtcatctaccgtatcaaccacatgagccaccaccggcagggaaacaagtggtgcatttatcccatgtatgacttcgcgcaccccattcaggacgcgctggagggcatcacccacagcctgtgctcgctggagttcgaggcgcaccggcccctgtacaactgggtcatcgagcactgtgagctgcccgcccatccccggcagatcgagtttgcccggctgggcatcgaccatacggtgatgtccaagcggaagctgcgcaagctggtggaggagaactatgtctccggctgggacgacccccgtatgcccaccctgtgtggcctgcgccgccggggctataccgccgccgccatccgcagcttctgcgagcgcatcggcgtggccaagtcccccaacaccattgagtacggcttcctggagcactgcctgcgggaggacctgaacgcccacgcggagcgcaccatggcggtgctgcacccggtgaagctgacggtgaccaactaccccgagggcaagagcgaggtattcacggtggagaacaaccccaccgacccggcgcagggcacccatgagatcaccttctcgcgccatctgtgggtcgaggcggaggactttatggaggtcccggtgcccaagtacaagcgactgacccccaacggtccggagtgccgcctgaagggcgcgtatctggtgcagtgtaccggctgtgtgaaggacgcggacggcaacgtcaccgaggtgctgtgcacctatgatccggagtccagcggcggtgatcccgccgacggccgcaaggtcaagggtgccacgctccactgggtggacgcggagaactgcatggacgcggaggtccggctgtacgacaacctgttttccgacgagcagcccgacggcccggacaaggacttcctggactgcctgaacccggagagccttacggtgctcaccggctgcaaggtggagccggagatgcggaaggtggcggaggcgttcgacaagcaggccgaccgcaccggcgtcaacgcgcctacgttccagttcatgcgtgtgggctatttctgcctggacaaccgtgacagctccgcggcgcacatggtgttcaaccgcagtgtgtcgctgaaggacagctttaagaagtgagaaaaagcaccccgcagggggtgctttttttcatgtgtgatttaagcgccggacctcgaagtctgtctcggccagggtgctgtcgacagtgcccacctgaagggtcacggtaaagatgcccgaagcactgtcgtagcgcagactgacatcgcggacccggagcccccggggataggcggcgctgctgagcagtctggtgctgcccagggtgagctggccgtcggcatccacctgaaaggcggcgccctcgccctccacgctgcccaggtcctgaatgaagatgtggtccagactgccgtccgcgccgggggtcacggtgccgcagaagcgcagcttgtcgctgataacgctggtaagggtggagcacagctcctgggcctcggacagctgcatggagctgttgtaggtgcggccggcgaagcggacgcccacggtcagcagggcgctgacgagcaggacgatgagaacggcgcacagcagctccgtcagggtgaagccgcggcggtcacgaagcttgttcatggcatgacctcctcgtaatagaggcagccgttgtcctcatagacctgcacggtggtgcggccgctgcgggtgccgccgccggaggcagtcagggcggcggtgccgttcgacaccgcgttgctatagtggaaggagatgtcggcggaacggaccttagcgttgatcttggcggcggaaacggcggcggtggtcagaaacacgaaggtcagtacgatgatcaggatggagaccagcgtctctaccagcgtttcgccgtgggtgctgttcagctttttgatacgaccgcctccttttcgatggtggcgttgtccggcgaccaggagatcgttgttgtggtcgtggtgacatcgcggacccagagaccgccgccgctgacggtgctgacagtgggatcggccttgttttcgcggagcgtcagcaccaggcggcagtcactgtcgccgccgtcggccaggtgcaggacgatggtgatgtcgtaattgggcgccatggtaaagacggcggagacatcatccagcccgtccacggatagggtgatggtgtcggtaaagcttttgccgctgtccctgtccacggcggccttgccggccttgagccatgcggccgtaaacccggtgggcgaggtcgtttcgcggctcgtttcggtggaggtgtcatcggtataggtggttttcaccgtctcctggacaaaggaggcgttcaggatatcatcacgcagcagacgggccgcggagctgaccgtcagatacgcctgccgggcagcccggtcattctccagacggcgggccgaggaggtggcggcggtgaggatcaccgcgctgaccatactggcggccagcagcagaaggagggccatcatcagcgtggcgccctgttggtttttcagtttgtgcacgggagggcctcctttctgcggtgggtcatggaagggtgtccggtgacggctcgggcgtgggatcggtgccggaactgctgctgtccggggcggatggatcatcggagggcgtgtcctccgggtccttgctgccggaagcgggggtatcggcgtccgggacggtgggggcgccgccgctgtccgtcgttttgcgcacggcggtgaaggccgtgtcggcatacagcggctgggtgatgtccggggtccagctgtcgatggtgtccggagagatgccgttgtccgtcagcagctgggacagggcttctgccgccggcgctgtgccgtaggggacagacagggtgagtgcctgctcatccacccggagggtggcggtcacccgggtgtcctcctccgtcagggtgtagggaatggacagggtgaaggcgtggccttcggtgtccatgagggtgacagtgagcgtcacggggcccgcctgcttgcccttgacggtcaggggccggacggtgaacagggtgtccgtcaggctctggggcgcgccctctatgatgcggtaatccgccgtgccggagagggcgtcgtaagtcacggcgtcggtgccggcgcccacagtgacagcagcggcggagagggtgaagcggtagcttccgtcctcgttggcggccgtcaggtccgcggcgctgccctggccgtacaggtacagcggcgcgccggtgtaggcgggggtgtcggtgtagggggcgccggagggcacgtcgtccgtgaaggccgtgccgtcccgatccatgacgccctgccagtagactgagggttcgccggaggtgttggcgatgcccagcacgccctgcatgcggacggggatcacaaggggcaactggctggtgaaggtctcgccgccgggggcagtgtaagtggcggtgaccatggtgcggtcctcgccctcaccagtggcggtgagggtgacagagaccgtgccgccggcatcaacggcgggggcagaggccgtgaggaccctgtcaccgtgctggggcgtgactgtccattcgacatccagtgcgctgccgcggctgtcgcgggcggtgagcgttaaattacaggtgtcaccgacaaagaagtcatcgccgggcaggccgtccacggagatgtccagcgtggaggtgacgctcaccagcagtcgggcggtatagccgcccagcgtggcgaagacctcggtagagccgaccgacaggccggtgagggtcacagcgtagctgtgcctgacgtctgccgggggcgtctgtgcctgcggtacggagacgtccacgatgccctcgcgggagcaggtgatggtgggtgtggcgtcagcgtcggtgtcctgggtgaagtgcagcgacagcgtggcgttgggggtggtgatacggtccagcgaaaggacgccgctgctccagtacaggccgcgggagggccattcgccgtagtgcaggcaggcggtgccctgggtcaatacggtggggaaggggtagtcctgtccgcggagggctgccgcactgccggggaagctgtatttgccgtgggccgactggccgttttcctccgtggtgacccagtggaagctgccgtcgtcgctgccgccgttcagcagcgcggtgaagctctttccgtcgatgtccgcacggccggacatctgctcgtagctcagggctgtcaggtcgttgatgttgtaggggctgctgccggtgttccaggtgtacttggacagatagctcagcttgccacggagcatatccatccgcgcggtatcggtgctcagcagggtggccagggagtagtaggtgtactgcccattggactgggtggacttgccgtagaaggtggggaggttgccgaagtagatcgcggcgctgctgtccaggtagtagcagttgttgatggtcagccgggcggtgccgccgttcacgccggcgcggtcggcgatgctgccgatgagggagatgccggtgatggtgccctccatggcagggaaggtcatgtaggtgtagcagttgttgtaggtgggttggccgtccttgctgccggagaagttggagaaggtggcggagaagccgctgccgccgatgccgccgatgtacacgtaggtgtccgggccggcctctgcgccgccctgggtcattttgacggatttaggcgtcttctcatagcgatccacgaaggaggtgttgggttcaccggtaaggatgcgctcgttcagcagatcgttggcgacggtgatgctgccgccggtgtagcagtccgacacatcatagcggacgccgcccaccaggccgcccacgcggacatagttgccccactgggccttgttcatggcgccggtgtttgtttcactggcgtagcggtgggtacagttgatattcagcttgaccacggcggagcacctgttcagattggcgctggatacgcccaccagcccgccgatggcggcttcgcccacgaactgccggtttttgctgttgtcggtcacggtgtagccggcaatggcgcagttgctgatggtgctgaccttcgtcttgtccttcaggttttcatcatagtcgtaggcaatgcctaccagaccgcccagggcgtaggaggtggcgtaattctccggcccggtggcaccggaggcgggggtggcgtcggtcttgcgctggataacggcgtcgttgtcgctgtagagcacgatgtttttgatctccgcgccggcggtggtaccgaacagacccacgttgtagcaatgggaggtgatgttcacattcttgatgtagtagttgccgccgtcgtagataccgccgaaccagttgtacagcgtcagatcataggtttcattgcccctgttcaactggccgttgttcaccgcgccggcaatggggtggaagtcgtagtttgcggccgtgccgtcggcggcggtgccgtgtcctgcgccgttgaggtcgtgggtctgctgccaggtgaggataggacgggggccgccggtgctgtcgccggccagcgccatcgcctttgtctgcagcgcattgccgcggcggttggtgtattgcagataggggtagtacttgtagtcactattactgcctgtgacatcgcgcgtcgtgctgccctgactgtcgatatagctccagttaatgtattgcagctgctctatggagcgtacctggtagggcttggaggccgttcccggcgcattgttggaggacagggcgaaggcgtcggcaaagaaggggctgacggtgtaggtcagcgcggcgtcctcgtgggtcagcgtccaggcatcgttggcctgggtgccgctggtcaggtgcagaccgttatcggaggtcttgtaggtgacgaaattgaattccggcatctgccggtgcaggtcatcggccgcctcggtatagcgagtgccggtcacggtgatgccggtggagagcgcaggctcagtggtgctgccggcggaccaatagtaaccgtagccgtaagcggtgacggtgccgccgtcgtcatgggagacacagagactgctgttggccttgtattcgccgtcctcgacaccgatcgaggagaaatagtagccgctgccggtgggcttggactcatattcccagtacagcaggcccagaacgcccatatcggcaggggtcacccagtcgccgtaatggacgcggctgccgtcgtggccggcgacgatgccgggataggggtaggccttgccggcggagtccagggtcttatcgtgctggaaggtattggcggcggagacggcgccaaagccgcccagccgggtgctcatgccgcgcagggccggctcgttcaccggagccgcgccggatctgtccgtgtactggtacaggtgaacgctgtctacaaagcggtatgtgccgccgttgaggtagcagcagccggatacgccgccggcagtgggggcaaagccgtgaatatccgcattgggtgaagtcatggctgtggcgcagtagctggcgcggagggagccggtgttgctgccggcaaagccgcccagcgtcacgccgccgccgttgatcgtgccgatctcaatgtcggccatggcgtagcactgctggacgacgccgctgttgccgcccgcgaagccgccggcgcagagcgtggcgtacaggctattggcgaaaaggcgcggtgcgctgacgccggaggcgcggaccgtaccgctgttgcgtcccaccaggccgcccagatacaggatactgccgtgacgggcgtcgccgttcacggagaagcccgcggcggcgcagttgtagaccgtgccctcgttgcagccggtcagggcgccgatgcaggcggtttgcagagagagctgaccttccagagaaacggtacgatccttattggcggtgagcagtatgatattgcgcagggtgccccggttcagaccgaacataccggcatagctggtgccgtcggtgttgacggcgccggtaaaggagggcgctgcgatggtatagccgccgccgtcgtaggtgtggatgaaaggcttgccgtccgcggcaccgataggcggctgcgtgtgcaccgtgggacgggcgtagctgttgtagtcgatggggcgctcctgccggaagacggctgtcttgtccagcagggtacggtaggtatcgtaatacaggctcaggtcgtgcagatgacgggccgtgcggaggccgatctccgccggggcgctgggcagggcggcgccctggatcacgcggcaggcgaagtggggattgaaaaagtaggagatgtcatccaccgtcacctgacggtagaaggcgggggacacctcactggtatagaccaactcgtcgggcaggcgtaccagccagtattcgctgtcgagtttgatggaattccacagggtggcggtgcgtgccgtatcgcccagggtataggcaacggtgatggcgtccgtgggctgggcgcggtagaccatgccgtagccgtcatccacgacggtgccgccggaacggagggtggagcggttggcacccaggaagccgtaggtgccgtcgctgtatttttcatagtaggccagcgcgccggactcgaaatccgcctgccagtcgccgtagtggggcagaccggtgagccgggggtaggagtaggtgctcaggcccatgttgtccatgaggttgtaggccacggtgtcgcttgtctccgcggtaaaggcggtacccagagccttgacaccctcagtacggttctggccgctccatttggcgtaattgatgaagctggtgccggacagatcgttccggctggggaacaggtaatagacagcgtctatatcggcgggagccgtgccggcagcagggggcttggcggtggagtaggtcagcttcatgtcggtgcccaggcggacgcaggcactgtaacaggccttgagtctgtcaccgccggagagctcgccgccggagagaccggcggtggtgccggcgctctggaagccggcggcgtagcagttggacagggcgatattggcggtgccgttgcaggcgcctatcaggccgccggcgacgccgttattggcggcggcatacaggtagcagtccgcgtaggaatggtccacagtcagagcagcgctgtccgtattgcccaccaggccgccggcatagcggacgccctgaatcacggtagccgcgaagctgcggcggatggtcagcgtgccgtcgcagcggcctgccagaccgcccgccgtgctgccgcggagccagatgtcctgttcggtcttggtgctgagtttgtcgcgggtgggactgagatacacctgacagtcgaggatctcggtattgccgctgagacggccggccaggccgccggcattgccggaggcggtgatgtcggcgccgcaaaggcgcaggttcttcagcgtgccggagaaggcggcaaaaagaccgccgtcgccggtggtgttcacggtcagaccgtaaatgaccgggtggtagacctgaccgttcacggtggccttgctctcgcagtaggtcaggcggctgttggtgatgggcgtgaacgtgcgggagccgtacaggcggtcccagccgtcgtcggcgttttcgttgacaaattggatatcctgctcctgcacggcgcgggtgatgctgtcgggcaagcgggaggccgtgtccagattttgcaggtggcgggcgtaggtaacaacggcggtgtcgccgccgcgaacctcggcaaacagactgttggcggtcagcgtgccggaggcggagtccaccagacggttctcacacgtcacctccacggtgatggtcaggtccgcgccgggggtcagatttttgtttttgaagcgggcctgctggccgaagcgcataccgtccgtcagagagtccaggaccatggtggcggtgtaggtgagatagtcggtcttgacctcgctgccggtcagctcgatgcgggaggtgctgtggacgccgtcggagacggtcacatagaagtgcagcggctccataggcgtgtcgcaggtgacgcgcagaagaagctgctctttgttgatgatctccatatggggcgtcagcttgccggtgatctcggactgcacactgtcgccgccgtaatagcccacggtggcgccggcgctcagccggccatcacggaaccgcaggggattgaagctgtcaaagtcgtaggtcaggtttttttcactgtaaaacacggcgtagacgctgccgctggcggggtcgagctcgatcacccaatggttgtcccacagctggcggtccacctggtcctccgggaggatggccgcggcggcggagccttcgccggtcttggcggcggaggtcacatagtacagggaggtttttctctcggcggcgtccagcggcgtgttgttcaggggctgcagatcctccgcatagcagtcggaaatgcggccattggccagcagttcggacaatttgttctgggcggcgtggtagacgatctccgccctggcgtccagttctgtctggcgcaggtcgcgctgatggcgggtgatggggatcatggccaggcccagcagcacgatcaggatggcgaccgcgatgaggacttcggacagcgtaaagccggaattattctgttttgagagctttttttgcataacacaatcgatacgctgccccgcaaagggacgcgggcggaaaaatggtggggacgcagtcagggtatcagctcgaaaaagatgaggtgaagcacggttttgtactgtgctttgtcggcgtcatactgcacgtccacgttggagaggaagttgacattggcgctggcgctcagcgcgtcgatgatctggcgggactgggcgtaggaagcggtctggtaggtcagcgtcacggggcgcagaacgagatagccctcctgggtggtgccctcggtgcagtccacctcgtattgcagggtggcggccatgagcttgtccagctcggtcatcagggcctggtcgttgtcgtactggggcagggcacgctcctggccggaggccttgatggcggcaatggcctgctgcatctgctccagctgggccagacggacacggtcggtgtccagctcggcctgctcgatgtcggtgttggtgcggagggaggttatctggcggtcgatgggctccagaaacagcttgcagtagcccaggaccagcaccagcaccaccaggaccagcagcagggtcttttctcgcttggtaagctcgcggttcattgagacacctcctccggctggcgcagttcgatgcggacggtgaaatccatgatggtggcggccttgccctcctccgtggaggcgacgctgagggagacgctgtccacgatgggggagaggcgcaggcgggcgaacatggcggagatctggtccagggtcatgccggacatatccacgttcatggtgttttgggtgatctggagcgccgtgagggagccatggctgagcatctcctgctccagcaggtccagggccgcctgacggtccacggcggcggggatgtcctcgctgccggcggcggtcatccagtccatggagtaggtgcggtattccagcaggacgcggtcatagtcggccagggcatcctgggcgctcacatactgggtgtggacgcggtcgtaggcggcctgggccttgtccagacggcggtactgctggagcacgccgaagttgaccacaacggttaccagcgccgcaatggccagaataccgatgagcagggtccggcggtcacgctggcggtcctcctgcaggttcaggttgataccggtcttctgggggcactttatcattttccgcgcgggcgcggcagtgcgcgtatccacggtgataccgttcttttccgcgatcattgcagacctcctctcagtccctcgtccacgccgccgatggcgcggagatacatccacggctcatccagggccacatcgtcacccagcagctcctgggcggtgtgcaggtgcaggtgagtggtctcggccagcgcctgacgcagggggacaatattgcagccgccgctgcacaggcacaggtcagtgagctcctgctgccggttgttgtaattgaagaagttgacggccttcatcacctccacggcgatgcgggcgtaaaacgattgggcatagtcggaggagagcacgtcgttgtagttttgcagcacatagctgtgggccacatggatatccacgccgcagtgctccgctaccagctgctccagacggttcaggcccaggtcgatctcccggcggctttcgaagaaggcgccgcggtagatgtagagataggcggcggtgtagcccaggttgacgatgcacatatcccgctggggcaggccggtgcggcggtagtaggccgccagcacgccggcgtaggcgcactcgctgggggtgaggacctgcagcctgaagccggcgcggcgcatcatggcgcggtagcgctccgccgtctccttgagcatggcgcaggccagcagcgtcatctcggtgggatagccgtcctggtcgcggagaatgtcgcgcatggagtagtcaaagtagtacttgctcttctcgtccgtaaggaagtcgcggaactcatagggcaggttgtagcgcagctgctgctccgtcatggcgggcatggtcagctcgcgggtaaagacctcggtggagggcaggaccacggcggcgttggtcaggggaatgctgttgtcccgggcggcctggcggaggaagtccgccatggcgtccatggacaagatcctgccgtcagccaccatgttgtccggcaggggggccatggcggcctttttcagcgtactgccggcgaagtaggccagcttgacgctgctgccgccgatatcaatgccaacgatcttcttcaaaacagaatacctcgctttcttggagatgggggctcacagcaatgacaggtaccagtcgataaggttctggccgaacagggcggcgcaccaggcggccagcgcgatgccggggccccagggaaggccctgctgtccgcgcttggcgcggacaaggccccacaggaggccgacgacgcaggccagcagcaggcacagcaggtttttctgccagcccagaaacagccctgtgagaaacagcagcttgatatcgccgccgcccatggcgtcgcggcggagcagcttctccatcagcagcgccagcagcaggacgccgccgcccacggcgacgccgccgatgaggccgtccagcgcccgtttgcccgggtccgggacaaaaaacagggtgacgataaaaagcacaacgccgaccgcgataaagcggtcggggatgatgtacccctccaggtccgcgaaggcgcaggccagcagcaggcaggccacggcccaggcttcgagggtccggagggagatatcatagcgcagcagcagcgacacgaacaccagcgcagccaccgcttcacccaccgcgtggcggggggagagcttcgcgccgcagtaacggcaacggccgcggctgaacacatagctgaacaccggcaccaggtcgcggggcgccagcacatggccgcagacgtcgcagtgggaacggccccggaggacactctcgccatggacgatgcgccaggcggcgcagttgagaaagctgcccatgcaggcgcccagcagggcggcgatgcagcagctgtatacggtgatggcgggggcagtgtacagcatggggaggctccttcggtgtggtgtgttctcccgggaccgggacagccgccaaccctcggctgtcccgcgccgggaacatacgacaggggactccaccccgccccaggggttggccggggcggggggaggaaaatgcgatgagattaggtgtcggctttgaacgtcgcaacgccgttggcaatggtgacggtcatcgtcttgccctttgtcttagcaatgtcgttgacggagacgccgccgatctccttgttgtcgtcaccgagcttgtcccatttgtcgctcttcatgacggagtccgtggtggcggtgccattgccgtcgttctcaagagcacttacaacagcctcggcatacgcggcgcggacgttcgcggcgtcggtggcttgatttgccttctcgatctggccagtgaacacggggatggcgatggccaccagcacgacgatgatggcgacgacgatcagcatctccatcagggtaaagcccttcttaattggtgagtttcttcatgatttctacctctttcgttttcagattttttggtctatatcgcagccggcacggggtggcgcgccgggaggatgacaaagtgaatcacataccgccgtacagggtgaacatgggcaggtacaccgccagcagcagcaccaccaccagcaccgcaaggcagatggtgatgatgggctccagcacggacagcagccgcgcggtggtgacggacacctcgttgtcgtagtagtcgccgatgacgtccagcgtctcctccagagagccggagcgctcgcccacgcccaccatctcggtgagcatgggggggaagtagtcgatggcggacatactctcagccatgggacggccgcgctccacgtcctgccggacctgacggaccgccagggagaaggtgtagttgctcacgacgttggcggtgacctccagtgcccggggcagcggcagacctgccgccagcagggtggccatgctgtgggcgaactgggcggcggcgttcatggagtgtatgcggcgcagcggggcgcgcgtcaggctccaggcggccagcgcggcgcggccgcgctccgtgcggcggaaggtcaggcaggcgatgaccagcagggcgaggatggccagcagcagccaccaccacttggtgaagaaggtactgacggccatcagagccttggtgacgccgggaaggtcgctgccaatctcgttaaacgcggtagtaaaggcggggacggccacggcgatgatgatgacgaacacgacgatggccacgatgatgaccatcacagggtacgtcagggtgctgacgatcttggccctggtcttggcggaacggtcgtagtaggcatgcagacgctggaagcagctctccagcgtgccggactgctcgccggcgcgcagcgtctcggtaaaggtcttgggcaggtagggggcgttgttctcgaagctctgggcaagggagtagcccgcgcccacctcctcggagaccttatccagcatccggcggaggtatttgttcttggtctgggcggctaccatggacacgcagcgctccaccgacagcccggaggccagaatgatggcgaattgggagcacaggagcgccagctccttctccttgacccggaaggccacggggcgggagagcacgctctccttcttctcgggaacggcctccagcttcgtgatgatggcaacgctctcgcggagcttgtccgccgcctcaaattcatcgtaggcgcggagcacaccggagactttcgcgccgccggcggtctggcctttataacggaatgtggtcatgggcgcggggcgctcctttctgtgaaatcaggtctcggcggcggtgttgatgacgcgggcggcctccgctgcggaggtgacgccggcaagcaccagctcgcggcagctctcccgcagggtggtgaagccgtccagccgggcggcggagagcagctcgtcgccgtcggcgccgtggctgatgcgccgacggaggcggctattgagcagcagtatctcgaacacggcgcggcggccgatgtagccggaatggcggcactcggggcagccgacgcccttgtagaaggtgacgtcgctgtcctcgggcaggccgagaagaagcagctcctcggcagagggacggtaagccgttttgcagtggggacagagcttgcggaccagacgctggctgaccacgccccgcagggcgctggacaccaaccagggctccacgccgatgtcctccagacggtggacggcggagacggcgtcgttggtgtgcagggtagagaggaccaggtggccggtgatggctgcccgcatggcgatggaggccgtctcaccgtcgcgtatctcgcccacggcgatgatgtccgggtcctgacgcaggatcgcgcgcaggccgctggcaaaggtcatgccggtcttttcgttgatctgacactggttcacgccggggaggtggtactccaccggatcctccagcgtgacgatgttcagcgcgtcgctggacaggtcgcggagcatattggacatggtggtggacttgccggagccggtggggcccaccagcagcaccacgccgctggtgtttttcagcagggcgttgtagttgtccaggtcgcggccctccagcccgaggacggacttgtccagcacctgggcggacttgtccagcaggcgaaggacgatcttctcaccgtagacggtgggcatggaggagatacgcagatcaaggctgtggccccggacggagaacatggcgtggccgtcctggggcaccttgtgctcggcaatattcatgccgcccatgatcttcaggcgggagatgacggtgttctgcagatcggcgggcacagtgagcacacgctgcagcaggccgtcaatacgcatacgcaccagcatttcaccctcttggggctccagatggatgtcgctggcgcgctcggtgaaggcgcgctcgatcagggagttgacaaagcggatggtgggggcggaggcctccgggtcggcggtgtcccgggccatctgggcggggatgatgtcctcgccggcaccggcctcgcgcttcatctcctcgatgacgcgggcggtgccctcgctgccgtacaggcgctcgatggcctgctccaccgccttgcgggtggcgatcatggggatgatgcgtttgcgggaggcggttttgacctcgtcctgggccacaaagtccagggggtcgtgcatggccaggtacagacggtcctgcaccagctttaccgggaccacgagaaaccttttggccaggttccgggggacgtatttggccagctccacgggaatggacacggcggtcaggtccacgaagtccacgcccagctgcacacgcagcgcgtcaatgagctgcgcttcggagataaccccctgccggatgagaacatcgcccagacgctggccgtcctcgcggggcagggccagggcctgctccagctgctcgccggtgatgataccggaggaaaccaaaagatcgcccagccgcatatatgtcacggaatacacctccaaacggtaaaaagcaaaaaaattaagtaggggcaaaaacgcgggacgcagtctgcgcctcgcggtagtgttttcaacccctacaataccctactgtatgtagtgaaaattactatactgcattttcgccgtaaagtcaattcctttttcgacatttttccacataaaatcggcaaaaatggagggttgatgtgtgaaaatcatgcgctcatatgacaaatttcagaagaacctgcaacaaatccgatcgtgtgataagaagctgttaacaagcatggttcagaaaagccaaccctttttacggcggggcggtggcggcgggtcccggcggaagggtttatccaccagaatgatgtcatcgccgaacttctggacgcactcccaggggatgtagtaatcctcgccccggccgaacagcccgaagaaccggcagggaccgaagacgatcagcgccttgacggagccctccggcaccgtgacctccacgtcgcctacgcagccaaggcggcagccgtcgcacaggttaatgacctctttgcgccgcagcagcgaaaatttgcacagcatcggcgtcacctcctgccgtcaggatatgcgcggcggaggctgtcccataccgtcggatcttagggcttttcgccggggagaataaccgccgcaccggcgggaaatactgccactatcacgaaagaggcaggtggcgtcatgcggggcagagtggagatcagcggcatcaacacagcgaagctgcctgtgctgaaaaacgacgagatgacggcgctgctgcgccgcgcccacgcaggtgatacagcggcgcgggagcagctgatctgcggcaatctgcggctggtgctgtcggtgctgcagcggttcgcggggcggggcgagagcgccgacgacctgttccaggtggggtgcatcggtttgatgaaggccatcgacaactttgatgtggagcagccggtgcggttctcgacttacggcgtgcccatgatcgtgggggagatacgccgctatctgcgggacaacagcgccctgcggatcagccgcagtatgcgggacacggcctacaagatcctgcgggcccgtgaggcgctgctggtggagacgcagcgggagcccacggtggagcagctggcgcggtatctggacattccgcgggaggacgtggtgtttgccatggacgcgttcagcgatccggtgagtttgtacgagccgctgtatgccgacagcggggacacggtgtgcgtcatggaccaggtgcgggacgagaagaacaccgacgagagctggctggaccgcatcgcgctgaaggacgccatagcccggttggacccgcggcagcggagcatactggcgctgcggttctgccaggggaagacgcagatggaggtcagcagcgagatcggtatctcacaggcgcaggtgtcacgactggaaaagacagcactgggcagcatcaggaagaatatgtgagtatcccccggcttcgccgggggatacttgtgtcttttgcgtcttttgaaaaacgccctcttttcttttggaaaagtttggtgtatactatatgctgaatgagtatttgcaccggaggtactaactatgtttgataatcgacgggagatcatgcaggatgtatttctgacgtatctgcccgcacaacgtttcaaaaccagccgcatgaccgtgcagctgatcgcacctttgcagagagagacagcggcggccaacgcgctgctgcccgccgtgctgcggcggggtaccgtccgctgcccggatatggagagcctgtccgccgcgctggatacgctgtacggcgccaatatcgactataccgtccgcaaaaagggtgagcgccagtgtgtgggttttgctgccggctttatcgacgatgccttcacgccccacggcgagaagctgctggagcctgtgtcggcgatgcttggcgagctgctgctggaccctgtgacccacgggggacgttttctgagcagctatgtggagagcgaaaaggccaacctgatcgacgccattcggggcctgaagaacgacaagcgtgactgggcggatatccggctcatgcaggagatgtgcgccggcgagccgtacagcgtgctgcgcctgggagacgaggagacggccgggcgtatcaccaaccagtcactgtatgtccatgggcaggcgctgatggcgtccagccgggtggaggtcatctactgcggcagcgcggaggcgcagcgtgtggaggacgcagtgctcacggcgctggcggcgctgccccgcggcgcccagacggcgctgccggaggtgcagcgcatacaggcaccggatacgccccggcggatcgtggagacgatggacgtgacccagggcaagctggccatgggctaccgctgcagcagcgacgactatccggccatggtgctggcaaatctgattttcggcggcaccagcaactccaagctgtttttgaacgtgcgggagaggctgagcctgtgctactacgcctccagcagctatgcccgcagcaagagcatcctgaccgtgtccagcggcgtggagaccgcagactttgaacgggcggagacggagatcggccgccagctgcaggcagtgcagcagggcgattgggaggactgggagcaggagggtgctctgcaggccatccgcgcgtcgctgctgtcactgtcggactctcagggtgcgctggagaatttctatctgggccagatcgcggctggggtcgaggagacaccggaggagctggccgcggcgctggagcaggtgacaaaggagcgcatcgtggcggcggcacagacggtgaagccggatacggtgtacttcctgcggggaaaggaggaggcgtaacatggacaagaagctgtatccccgcatcggcgaggaagtgatatgggagacgctggacaacggactgccggtgtgcatcgtgccgaagcagggcttttcccgaaagtacgcgctgtttgccacccgttacggcggcatggatatgcgctttgagctgaacggacagtggctggacactccggcaggcatcgcccactatctggagcacaagatgttcgacacgaaggacggcaacgccctgcaggagctggcgaaaaacggcgcggagcccaacgctttcacctccaacgccattacgtgctactattttgactctacggagaagttttacgaaaatctggagatactgctgtccttcgtgtctgtgccctatttcaccgatgagagcgtggagaaggaacagggcatcatcggccaggagatcggcatgatcgaggacaaccccgagtggcaggtgtacaagcagatgatgcaggcgctgtaccgcagcagtcccgcgcggacgccggtggccggcagcgtggagagcatcagccatatcacggcgcagacgctgtatgactgccacaaggcgttctacaccccggcaaatatgtgcctggtggtggtaggcgatgtggaccccgagacggtgctggccacggcaaagcgggtgctgccggcggagagtggggcgatcatccggcgcgactatggcgcggaggagagtaccgacgctgcctgcggctatgccgaggcacagatggaggtggccatgcccacgttcctggtaggcttcaagtgcccgccccagcacggaggggaggcgcagcaccggtttgccgccatcggcgagctggcttgtgatgtgctcatgggcgagtccagcccgctgtatgcgcggctgtacagccagggactgatcaacggctccttcggcgcggcgttcgacctgctgcccggcgcggcctatgcctatgccggcggcgacagcaaggacccgaaggccgtggcggaggccattctggacgaggcgcagcggctggcggcggagggtgtggacggcgactattacaagcggatcgtcaacgccaacttcggcgcggcgctgcgggagctgaacgcctttgagtccatcgccgtgtccatggcggaggggcggttccaggggtatgacccgtaccgcttcccggagatatacgatgacatcaccgcggaggatgtgcgcgcgttcctgcgggagaacttcacgcgggcgcacatggcgctgtcggtgatcgcgcccaaggagggataacatgaacgtgaggatcatggcggacagccccatccggtttccggggcttttcggggactgggcctttaccggctcgtccgtagccttccatatcggaggaaaggccatttattggtacggaatcatcatcgcgctgggcgtgctgctggcgctgtggttctgcatgaagcagaaggaaaagtacggaatcaccgaggataacttgatggacggtgtgctgtggggcattcctctggctatcgtgggggcgcggctgtactatgtgctgttttatctggaccggttcaaaaaagcggatggttcctttgactgggcggagtccgtggctatatgggacggcgggctggctatctacggcggcgtgatcgcggcggtgctggtgtgcttcgtgctcagcaaaaagcggggcttcaagctgggggcgctgaccgacctgatcgtgatggggctgctgatcgggcaggccatcgggcgctggggcaacttcatgaaccgggaggccttcggcgcggagacgacgctgccgtggcggatgcagctgaccaccaccgcggggacgctggtggaggtgcatcctacgttcctgtacgagagcctgtggaacgtagtggggctgctgctgatcgtctttatcgtggcgaagggacgccgcttcgacggcgagaacacctggttctacttcctgtggtacggtatcggacggttctgggtcgaggggctgcggaccgacagcctgtacctgttcaactggaccatcggcggcgatcccatccgcgtcagccaggcgctgagcctggtgatggtgctggtgtcggcgttcatgctgctgtacaacatcaagctgcatccccacaagccggaggagctgtatgtgaatatcgccgcggcgcagaaggcggcagagggcgaaggcgcggacggcagcgcggagtgacgcgatgcggcttcggcgcggtgtacaggtccattgcagaacaccatatgcagcccgctttcggaacgggcggcgctgtaaaaaaagaacacccacggcttcagccgtgggtgttttgtctgcatcagtgccgccgcgcggtgaggtagtggttgttgtagtacgtctcggacagggaggtgatcaccacgcagtgcccgttgtagtaggaggacgaggcgtggatgaactggtcgccgccgatatagatgcccacatgggaggcggtatagccgtagtcctggaagaataccagatcgccgggctgcagatcgctgcgggagacctcggtgccgtagctgagctggctggtggcgccgtggggcagcttgatgcccacctgggcgaagacatacatggtgaagccggagcagtcgaagccgctggcagaggaaccgccgtagacgtagggcacgcccagatactgctgggcgatggagacgatgctgctgccggaggcggaggcggccggcgttgccggggtctcggcaggtgcttcagcgggagacccttcggtcgttgtattctcggcgggcttgtccgccgtgccggtcagggcggaggtggggcagatcagcacgtactgcgaggccacatagccgctgatgccgttgtaggtaacggcgaaccagccgccggactcaatgccggtgacggcaatgaccgtgccctgagatacggtgcccagagaggtgctgccgcttttggcggcggtgcggatgttcagcacgtccgcggtgacacgtccggcgccgttaaggccggaggcggtgtcgtagcgggtgacatactgggcagccacatagccgcgcttgccgtcgaaggagatacggtaccagtcaccctcctgggcggtgagctcgataacggtgcccttgtccagggtcttgaggatgtcatagccggtgcccgcgccgctgcgcatacggacgccggtgccggagatcacgcccagtgcctgaacggcggtggagacgggcgcctcgtcggcctcgggcgtctcctggggcggttcttcctcggcggcctgtgcggcagcagccttggcggcgtcctcgttgttgagcagggcatcctcggcggtctcgccgccgggatgggccgtcagcgccgctgcgcccagcaggccggagaacagtgctgtctcgggagagggctcagtggtgtcggtgggcagggcggagacggaggcaatggtcaggggcacggcgggggcggcgtcggtcatgctggcggcggcaccgccgaagttgaccaccgcgtcaccgccgatgaccaacagcgtggccagagccactgctaatgcggaaaaaatacgcttcatggcttacagcttgccggcgagggcacgctccagccagatgcagcccacatccatggcggcatagaggctgtccttctcagatttcttgaccacgcggtcccgggacttgaggtccgggtcggtcagctgaagctggacggatacacgcttggccacgtccatgtcctgctccttgacggtgtcgagaatctgcaggaggacgatgtacttgtctgccatgctgccgtagtagatgaaattgtctacgcggcgcagggggtggttcttatagacaagcccttcgggctttttgttttcagccatgatgatacctccgaaaatttttgtaaccaaattgtaacacatttgaacggggctgtcaacgcaggcgcggcaggaaaaatatgggactttgtgccgcaaaggaaaaaggggctgccgcgcttctgcacggcagccccttacagcggtacgcttacagctccagatagctcttcaccaggacctgcagcagctcgtcccggtcgatcttgcagatcagggaccgggcggagttgtggttggtgatgtaggtaggatcctcggagagaatgtagcccacgatctgattgatgggatcatagcccttctccttgagtgattcgtagacggaggtgaggatgtggtgtacctgctgctccttatcctctgccgcgttgaacttacgggtaaattcgtccatgtgggcaccgcctttctcattttctcaatatcgcttttagtatacgctcttttcccggaactgtaaaggggaaaaagtgcgcggtacagggggaaatctgcgcgggatcagcggcgcagctccgcaccgaagcgcttggagatcttgttgagcacgccggaggcgacctcctcgatctcggcggaggtcagggtcttatccttggagccgatggccaggcgcagcgtcagggacttcttgcctgccgggacctgcttgccgcggtactcatctacgaaggccgcgccgtggagcagctcactcttgatgccgcggacggtctgggccacgtccttccactggacggaaccatccaccagcagggagatgtcgtagtcggtcatgggatactcggccaggtgggtgaaggtgttggtgcgggacttcagggggaccaaagagtcctgatccagctggaagagcattacgttcatgttcttgatgccgcaggccatggagaccttcttggccagcagggccaggtcgcctaccttctcgtcaccgcggtagatgttcagccacaccacgttgtcggcccacacgggcttctccgtctggcggaaggtcagcgtctccatgtggacgtaccgcgccatcatctccaccacgcccctggccttgcggaacagggcggtgatgtccttgtcggtggtggcgaaggcgcccgccacgttcttgcgctgggagggcagcttctcgcggggatcgtagggggaggtgtagttctcgtcgcggaacacctgcgccgtctcgaaaatggagaactcgttgaagtagcgctcgttcttcaccacggccttgcacaggttgggcagcagggaggagcgcacgaaccgctcggcgggagacggcggcgtggacagggacagaatgccctctgtgctctgcagcaccgcgttgacgtaggattcctccatccacggataggtgaagatctcctgcatgccgcagcggatggccagatactccttgatgcgccgttccagatccttgtccagctggttgatggcaccgtcgaaggtggtggtgatgggctcggcctcgaagttctcgtagccgtacatccgggcgacctcctccatgatgtccgcctggatggatacatcgccggtggaacgccaggtggggaccaccacatgcatattgtcgccgttgaaggtgatgctgtagcccagcagctccattttgtgcttgatctcatccggggacaggtgcttgcccagccggcgttccagccagctgagggccacgtcgatctccgccggcttcaggtgctcggggtactggtccaccaggccggtgaccttcatctccgggtacagctgggagaacagctgcatggacaggtcgaaggcctggtcgcagcgctccgggtcaatggccttttcataacgggcggaggcctcggtgcggttgtcataccgcagggcggtgcggcggatgcccttggcgtcgaagttggcgacctccaggatgaccttagaggtatccggcaggatggagtccttggcgccgcccataacgcccgccagacccaccacgccggcgtcgtctgcgatgaccagatcgtcggaggacagggccagctccttgccgttcagcagcaggagcttttcgccctcgccggcgcggcggacgatcacgtggccagcgatgtggtcggagtcaaatgcatgggtgggttggccagtggccagcataacgtagttggtgatgtccaccagcgcgttgatgggacgcatgcccaccttccagatgcggttctgcatctgatagggggcgggcttgacgttcagaccctcgatctgggcagagaggtagcgggggcagcgctcagcgtcctccacggtgacgtggaacccggcggtgttctccacgttccggtcgaagtgggggaactgcgtcatgggcaggtcgtacagcgccgcgatctcgcgggcgatgccgtagtgtccccacaggtcgggacggttggtcatggacttgttgtcgatctccagaatgatatcgttcaggtccagagcgtcggccaaaggggtgccggcgggggcgtcaaagtcactgaggtccagaatgtgggcttcctccttggtggggaacaggtcggccaggccgatctccaccgcgccgcagatcatgccgtagctgtccacgccgcggagcttgcttttcttgatctccaccaggtcgccctcgccgtgccacttgcacatggcgccgggcagggccacagctactttcatgccctcgcggagattgctgccgccgcagacaatgtcctccacacggccgccgatatcggtcttgcacaccttcagcttgtcggcgttggggtgctgctcgatggtgttgataacgcccaccaccatgtcgtggaaggacgcgcccagatcggtggcgtcctccacctccacggtggacatggtcaggtcgtaggccagctttttcaggtcggcgtcagccggcagctggacgtaatcgcggatccaattcaaagatactttcatgtcgtgtaccctcccttatcagcggaactgttccaggaagcgcagatcggcgctgtggaacagacggacgtcatccacgccgtagcgcatcattaccaggcggtccagaccgatgttgacgtagaagccggtgtattcattggggtccaggccggcggccttcagcacgttggggtgaggcgtgccgccgggcatgacctcgatccagcccacgtgcttgcacacactgcagcccttgccgccgcagaccaggcagcccatgtcgatctcaaagccgggctcgacgaacgggaagaagccggcgcgcatacggaccggaacgtcgcggccaaagaccttgctgaggatgctcttgatcatcaccttgccggaggcaaaggtgaagtccttgtccacgatcagcgcctcgtactggaagaaggcacgctcgtgccgggcgtccgtcgtctcgttgcggtacaccttgccgggatacacgaagcggtagggggccttgtgggtctggagatagcggacggagccgccggtcaggtggggccgcaggcacagcttgtcccagcattcgcccttgtcatggcccgccagccaataggtgtccatgctctcgcgggcgggatggttgggggggaagttcaggttgtcgaagccgtagagctcgctggtgatgtcatcctcctcaaagatctcaaagcccatggaacggaaggcgtcattcaggtcgtagcacatctgggtgatggggtgcagaccaccgctgaggggcatggtgccggggacggagatgtcaaagtccgggtccacctcggaggccttcatcttcagctcgtcacggcgctcgtccagcagggcggacagctgtcctttcaccaggttgacggccttgcccatctcgggtcgcagggatacatccagcttgggcagctccttcatcagctcggtcaggctgccctgcttgcccaacagcgcggccttgatgtcctgaagctccgtctcggtggcgacggaggcgatgcgctgcttgccctcggccagcagctgttccagtttttctttcatgtatttgcttcctcctcttcagagttgtttaatggggtaaagcgcaataaaaaacacctttcatcccatgtcttgggacgaaaggcgaacttccgtggtaccacccagcttcgcggaccttgtccgcgcactcattacccggtaacggcggggcccggccgcgcatttcctcgcggcagctcccgggcgaacactgcggtacatcccaagtcggcttgcagccggtggccgactctctctgccggatgcgtgggcgcagatcttcccgttcacagcttttttgcttgatggataacttataccacaacaaagggaaacttgcaagcacttttttcgcggcgcgatacgaaaaaagcaggttttgtaattgacatatgtgctatactgtacaaaaaggcacggggaggtgcgctatgcaggtcatcgacagggcgtttgtgcggggccttatgcccgcccgggaccagggcggacacaaagggaccttcggcaaggtctatctgctgggcggcagcgtggggtacaccggcgcgccggtgctgtgtgccggcggggcggtacacagcggctgcgggctggtgttcctgggcgtgccggagacggtgtggcccatcgcggcggccagatgcctgtgcgctatgcctcatccgctggcggagcaggacggaaggctctccgcggctgcggagacggagatacgccaccgtgccgccgtctgcgatgccgtggccgtgggctgcggcctggggcggagcgagggcagcgatgcattggtgaacgcgctgctgacgctggaaaagccgctggtgttggacgccgacggcataaacgcgctggcggggcatatagatacattgtcctgccgccggggccgtgtgacggtgctgacgccccacgacggggaactggcccgcatcggcggcgacatgaccgcgccccgtgaggcggcggccgccgcctttgccgccgatcacggcgtgtacctgatccgcaagggccatcggacggtggcagccgcgccggacggccgtctggcggtgaacaccaccgggaacgacggtatggccaagggcggcagcggcgatgtgctgacgggtcttttgaccggactgctggcccagggcatggaaccatttgacgcctgctgcgcggcggtgtggatccacggccgtgccggggatatggcggcggaggaaaagggacggcggggcatgaccccggcggatatgatagagaagctgccctatgcgctgaaagaggtggaatgaccggaaagcccttctgaaaaaaggagggacggaccatgcgaaaatgtgtgctgccgctgttgctgtgtgcggtgctgctgtgcggctgcggcggtgagaagagtctgacggtgcaggaccagtaccggacggtggtatcggcggacatggaggcggaggtggtcagccgtacggccagcgacgaccgcaccttcaccctgacgtgccggtatgaccgggcggggcagtctgtcaccacggtaacggcgccggaggcgctgaagggcctgaccgccgtgctggcggacggacagctgtcgctgaagagccgtgaccagctgctgccggcaggggatgccacggatatctgcccggccaactgtctgccagagctgctgcgaacactggcggagggctatctgaaggagcagggcacggagccgttggaggacacgccatgcctgcgcctgacgctggagaccaccgggcaaagcggcgcggcggtgctatgcagcgtgtggctggacgagagcagcctgatcccgcggtatgcggagttttcacagaacggaaatgtggtgctgacggtgcgaatgatatcctttgcctgcaccacgggagatacggaggcgtaacaatggaatcgacactgaggagaacatgggcggagatcgacctggacgcgctggcgcacaactatcggacgctgcgtgaccgggtaggcccggaggtgaagtttctgggtgtggtgaaggcggatgcctacggccacggggccgtacaggtgagccggaccctgcaggcgctgggcgcggactacctggcggtgtccagcatagacgaggcggcggagctgcggtgcaacggcatcaccatgcccatcctgatcctgggccacacgccccgtgagcaggtgggacggctcatcgacctgcacattacccaggcggtgtcctgccaggctaaggcgctggagtacagcgaggaggccgtgcgctgcggcggcgagctgacggtgcacatcaaggtggacacaggtatgtcgcggttgggatatctggtttccggcaggcatttcgacaccggcacggcggatatctgcgcggcctgcgccctgccgggtctgcgggcggagggcatctttacccattttgccgtgtcggacgagccggatacggacagccgcgcctatacggaaaagcagctggcgctgttccgccgggtcatcgacgcggtggaggcaaagcgcggccagcggttcgccatacgccactgtgccaactccggcggcgtggcgtcgtacccggagacatatatggacatggtgcgtcccggcattttgctgtacggctgcggcgacctggcggagaagctggggctgcacccggtgatggcgctcaagaccacagtgagcaccatcaagacctatgagccgggcacggacgtcagctacgggcggcggttcaccacagagcgcgtcacgcggatgggcgtggtgccctacggctacgcggacggctttcaccggtgtctgtcggatcggtgcggctttatgaccgcggagggtatggcgcctcagcgggggcggatctgcatggacatgagcatgatcgacctgacggacctgcctggtgtgcaggtgggcgacgaggtggaggtgttcggcaagcggcagcgggtggacgtgctggcggctgccgccgggaccatcccctatgagctgacctgcgccgtcagccggcgggtaccacgggtgtattataaggacggacgggaagtggaaaaggagctgctgctgcggttctgaggcttcacatcggcgccgcggcgcgcataggatagaccgggcgggacaaaacggaatttacggcgctgcggcgtataaatccggcggctgcgtgggacaatggaagtgacctggggacatatctccctccggtacttcttgcctcggagtgtgaactgtgtggatacgactgtcagacgcggcgacatttactatgcggacctcagccccgtggtgggcagcgagcaggggggcgtgcgcccggtgctgatcgtacagaacgataccggcaaccggcacagtcccaccgtcatcgccgccgccatcacgtcgcagctggggaaggcgaagctgcctacccatatcgcgctggcggcccagggcagcggactgccgcgggattccgtgatcctgctggagcagatacggacgctggataaaaagcgcctgcgggagcgcatgggccgtgtggacagcgcagtgatggaaaaggtggacgccgccattgccgtcagcttcgggctgacggggagccatctggtgtgaacggcggcgatgacatgagaaaacaggcctgtgcatagtatggcacaggcctgttttttgtgaaagggggcggcgcgccgtggaatatccggtctgtctggcggatagctgcgtggggacgctgtacgtgtgtccgcggggagaggagacggagctgcgggcggtgtgccggggaacggagaagggactgtaccggctgtacgtgcagggcaacaggggcgaggtgctgctgggcgtcaccgaggacggcgggctgcggcgctgcttttcccgggagctgcttgctcccgccggggaattgcgccgcggtgtgctgcggctgtgcggcggcgaagcgccggaacggcgtgggtttctctcccgactgccggagatggcgcggacggcgcggcaggggcgctgtgtgcgggcgctggtcccgtggcgggagggggagcccttcccgatcccggagctgttctgctttgcaagcgtggggcagggacgggtgacgtacctctttgatggcgagggccggcccattatgccgaaataacggcgaaaatttgaaaaaagactaccatatgttgtggatatatgctatactgtctctgactatacggcatctgccgtagagataaggaggagcaagagagatgagatgcccctattgcggttataaagagagcaaggtggtggattcccgccccgccgacgagggcagcagtatccgccgccgccgggagtgtttgcagtgcgaaaagcgcttcactacctatgagacggtggagagcctgccgatggtggtcattaagaaggacggttcccgccagagctttgacagaagcaaggtgctgcggggcatccagcgctcctgcgagaagcggccggtgcccgtggcggacatggagcgcatggcgctggagatcgagcaggagctgcaaaactccctggagcgcgaggtcagcaccgatgtcatcggcgagaaggtcatggagaagctgaaaaaggccgacgaggtggcctatgtccgctttgcctccgtgtaccggcagttcaaggatatcaacacgttcatgtccgagctgaataagctgctgagcgagaagtgaccgtcagaagatatttttgggactgagctgctgcgtttcggcgatgagccggaactggtggcgcagctgggccatcacggggtacagctcttcggtgctgccctgggcagacagggccttggcctgggccatcagggcctcggcctcgtccaggtcctcatgggagacgatgatgtgcatatagccttgaacgtcctgccacaggtcgtccaaggtgcccagcgccgccccgccgtcgccgccggcatccaggtcggcggtgactgtgtccaccgcggcagtccactcgccgcagcggtccgtgacccaggcggcgttccacaggatgaagaacagcacggccagcagtacgaacagggggatgcggacggccctcatcgcgcagcctccttccgcagacacaccacggtgccatgttggtccacggacagcaaaaacacgtcctgactgcgggcgatgccctgccggtgaagctcctgcgccagccagcggtcatcacggcccgcctgccggaggttatccgtcagcacccggccgtcgttgatgaggatgatgggcaggaatacgttgtcctgtacgtccagccccagatgctccggcgtgaccggctggaggggactgcggggcagcacagacagccggccgttcgtctccagcacggcgtactttacgtcgctcaggtcggtgatcccctggccccgcagctgctcgaacagctcgtccagcgtcagtcggttgcggcgcatggtctcctgccgcagcttgccgtccacgatcaccagggccggctggccgcagaccaggtcccggaagcgtacattccgcaggctgatggcgctgaacagtgtggacagggcgatcagcgtgatgatgggaatgacgccgttgaacagcggcagggcaaagtcctgcatgggtacggaggccaggtcggagatcagcagcgtcagcaccagctcgatgggctccagctcgccgatctgccgcttgccgctgaggcgcaggcccgcgatcagcagcagatagagaatgaccgtgcggaaaaaggcagtcgccatgatcgtacaccccttcggaagttgtattccggagcagtatgccccgcggcggggcaaattatgttggtatacagcggcaaagccgctttgtatatggctcgcagaacggaaaggaggatctcggcacaggccgacataagcgccagcgctcatacagccgacggatgtttcccgccggcttgtcgctgctctttttgaaggcggcggcgaacatgagacgacgaggcggagagtgatcgaagtattcggcggatgctctcccgtgccgtccgggtgcgtacacagtcagcaaatatgcgggtgaccgcaaaacagagaggctgtgaccggatgtgaagacaaatgatctgcgcgtttgtgcttccgacctattatattgatcggaggattttatttatatgtgtggtatcgtaggatacgttggacagcagcaggctgcgccgctgctgctggatggattgtgccgcctggagtaccggggctatgactccgccggtatcgcggtctgcagcggagacacccttcaggtacgcaagacgccggggcgtcttgcggcgctggagacgctgacccacggcggggcggatctgccggggacagtgggcatcggccacacccggtgggctactcacggcgagcccaatcaggtgaacgcccatccgcaggtcagcggcgacggaaagttcgccgtggtgcacaacgggatcatcgagaatttcgcccggctgaagcaggagctgatccagaagggctgcacgttcgtgtccgagacggatacggaggtggtggcccagctgttggcctggtattacagccagtgcggcgatgtgttcgaggcggtgaaccagatgctctcccgggtggagggcgcctatgcgctgggtatcctgtgcgccgacacgccggaccggatcatcgccgcacgaaaggacgcgccgctgctgctgggctgcggccggggggagaacttcctggcctcggatgtgacggcgctgctgcggcacacccgtgacgtggtgtatatggatgacggcgagctggctgtcatcacggcggagggtatccgtatctacgacgagcgccgccggcccatcgacaaggagcaccgtcacatcgactgggatgtggacgccgcggaaaagggcggttacgaccacttcatgctcaaggagatctatgagcagccggcggcggtgcgccgcgccatcaccggacgcatccgggacggccgtgtggtgctcagcgacctgactatgacggacagagagatccgtgatatcggccgcatctgcatcgtggcctgcgggtccagctaccatgtgggcatggtgggcaaatacaccctggaacggctgctgcgccgcccggtggaggtctgcctggcgtcagagttccggtacagcgaccccctggtgggcgagggcgatctgatcatcgtcatcagccagtccggtgagacgctggactccatggccgccctgcgcgaggccaaaaagcgcggcgcccgggtgctgtccatcgtgaacgtggtgggctcgtccatcgcccgggagagcgacgacgtgctctacacctgggccggaccggagatcgccgtggccaccacgaaagcgtacagcacccagatggcggtgctgcacctgctggggctgtatttcggcgatgtgctgggcaccgtggattatgagacatacagcgctatggtacgggggctggaggccctgccggggcagatggagcaggtgctctcccatacggaggatatccgcgcggccgccaaatggctggcgcaggaggaggatgtgttcttcatcggccggaatctggactatgcattgtccctggaggggagcctgaagctgaaggagatcagctacatccactcggaggcctatgcctccggtgagctgaagcacggcaccatctctctgatccgccagggaacgccggtgatcgctgtggctgcctatctgccgctgctggataaggcggtcagcaatgtggtggaggtacaggcccgcggcgcgcgggtgctggccctgaccaccgaggccggggccgaggccctgcacaagcgggtggatacggtgttgaccgtgccggaggcggaggctatgctcctgccgcagctgggcgtgatcccgctgcaactgctgtcctactacacagcgctggagcgcggctgcgacattgataagccgcgtaatctggcaaagagcgtcactgtggaatgaccgctggtatacacaggacttacgaaaaggaggaacagctatggagatccgtttggcagcaatggacgatctggccgctgtaacggcgctggaggcggtgtgcttcccaccggccgaggcggcgcaggaggacagcctccgcgcacggttggccgcatacccgaaccacttctggcttctggaggacgagggacggctggtgagcttcgtcaacggccttgtcaccgatgtgtatgatctgacggatgagatgttcgatgatgtgtcctatcacagcgagaacggcgggtggcagatgatattcggcgtggcgacccacccggattatcagcgccgcggctgcgcggaaaagctgctgcgctacgtggtggagcaggcccgccagcagggaagaaagggccttgtgctgacctgcaaggagcatctgctgcacttttacggcaaggtgggcttcgtggacgagggcatctctggttctacccacggcggtgcggtgtggcacaagatgcgcctgacattctgacaaatggcaaggaaagggggggaaagcattttcccccctttcttttttcaaaagggtatgttatactcaaaaattgactgaataccaaggaaagggcgtgtacgccatgcacgacgagctgatacgccggctcaatgaaacaaagaccatgtccatcgtgggtatgtgcaagaacgcgggcaagaccaccatgctcaactggctgctgacggcgggccatctgcggggtacgctggggctgacctccatcgggcgggacggcgagtccaccgatgtggtcaccggcacggaaaaaccgggtatctttgtccgtgagggtacactgatcgccacggccaaggatatgctgcggctgggcgacgtgacaaaggagattttgatgaccacaggtatccctaccccgctgggcgaggtggtcatcatgcgcgcccgcagcgccggctatgtgcagctggcggggccctctatcaccacgcagctgcggtcggtgtctgagagcttttttgccttgggggctgagaagtccgtcatcgacggtgcgttggggcgcaagagcctgggcgcccgggcggtggcggagggcgttatcctgtgtaccggcgccagctacaacgccagcatggagaaggtcatcgccgacacggtgcacatctaccggctgatgaacctgcccaaggccgagacactgccgccggagtgccccgacgggctggaggcctgtgtccggaagcacggcgcggcgctggtgaccggtgcactgacggatacaatggtggtgccgctgctgcgaagcggcgtgctgcggaagtgccgcctggtggtcaaggaccccagcaaggtgctgctcagcgccgatacactggataagctggcggtgcgtgaggtggcgctggagacggaggacgcggcgaagacgctgtgcgtcaccgtgaacccggtgtccgcctacggatggaaattcgacaaggatgaattcctgttccgcatgaaagaggcggtggacgtaccggtcatcaatgtgaaggaggaactggcatgatcgcggtcaagtttgaggaaaaagagaagatcggcctgcaatacgcgctggaaacactgcacggctgctcgcccttcgggcaggaacgcattcggcggctgcggttttatgcgccggaggaacgcgccgcactggaggaggagctgtacaacgtggagcaggcggccaacgccgccggtgagctgaaggacgtgtacaacaagctgatgaccggcctgtgccagatgaaggatatccgcaactccctgcgccgctgcgcggcgggggagacgccggaccatgtggagttgtttgagatcaagggctatttgcagcggctggacggtatgcgcccgctgtttgagcagatcaacgcggtgacgcacttcaagggcatgaccttccacgaggtgaaggacgcattggcggtgctggacccggatggtaccgggagccggggcttctatatcccggacagcgccacggcaaaactgaaggagatccgcagcgccaagaaagaggtggaggaacggctgttccacgcccagaccgacgcggaaaaggacgatctgcgcctgaagcgcacccggctgtgcggcgaggaggacgcggaggagatgcacgtccgcaaggccatgggcgcggcgctggcccctatggtggacgatctgctctccgatgcggagacggcggggcgtctggactttattatccaaaaggcactgtttgccgtgcgctacggcggtgtgaagccggagctgacggagaaggacctggagctggaggatatgatcaatccggagatctgcgacctgctggagcagcagggccgccgcttcgtgccggtgtccatctccctgacgcccggggccacggtcatcactggcgccaacatgggcggcaagtccgtggccatgaagacggtggcgctgaacgtgctgttgctgcaggcgggcttcctggtgtgcgccaaaaaagcccgtatgccgctgttccacagcgtgaagatgctctttgacgacctgcagtccatccagtccggcctgtccggcttcggttcggagatcgtacagttccagaaggcgctctccgaggtggagcagggctattcgctgttcctgctggatgagtttgcccggggcaccaacccggacgagggcgcggtgatcgtgcaggcggtgacgcggtatctcaacggtgtggacgccatctcactgctgaccacccactatgacaaggtggcggagtacgcccggacccactatcagatcatcggtctgcgggatatcgacccggaggctatccgccgggagctggccgtgaccagcgaggacggcgtggcggtcatcgcgcggcacatgaactacggcctgtatcgggtggagggaaagtccgactgcccgcgggacgcgctgaacatctgccggatgctgtccctgaagccggagatactgaaaatggtggaggaaagctattaaaaaagcgccctgcggggcgctttttttctgtgcggggtgcggacatggagggaggggtgctttctcggggaaatgccgaaatacaaggctgaaatttattcgtatcgcacaaaaaaattattgtcttttctgtcacaatgtcacttgacaagaccgctgaaaaaggtataatttatagatagaaatttcataatatcagtcaatagaggcgcggaggacagggtactgcatatttggggacaggcacccggtaaatttgcaggaaggggtcttccgccgaaggggccggacgggtctgtgcgtgcggttcctggcagcgcggtgtaagcggcgctgctgtcatgtagtgatacatggagcgctattggtcaacgaccttgaccgatagcgcttttttcatacccaaaagaagtgccgaggccagctctggtattggaaatgcacgtccaaaaatttgaaggaggaaaaacttatggaaaagatgacatctctgcttcgtctgcgtatgagcgcgaaggacgcccactacggcggcaacctggtggacggcgcacacatggtgcacctgttcggcgatgtggccaccgagctgctgatcaagtgcgacggcgatgagggcctgttctgcgcgtatgacaacgtggagttcctggcacccgtctacgccggcgactacatcgaggcctacggcgagatcgagaagatcggcaacacctcccgtaccatgaagttcgaggcccgcaaggtcatcgtctcccgccccgacatcagcgcttccgccgctgacgttctggctgagcccgtggtggtctgccgtgcccacggcacctgcgtcacccccaaggactgccagcgtctgcccatcgagaagtaaggagcggaaacaatggagaagctcattattaccgccgctatctgcggcgctgaggtcactaaggcccagaacgaggctgttccctataccgtcgaggagatggtccgcgaggctaagtccgcctacgaggccggtgcggcgatcctgcacatccacgtccgtgaggatgacggcactcccacccagggccgcgagcgtttcaaagtcgtcatggacgccatccgcaaggagctgcccgacgtcatcatgatcccctccaccggcggcgccaccggcatgagccccgaggagcgtctgcagcccaccgagctgttccccgagatggccaccctggactgcggtacctgcaacttcggcgatgagatcttcgataacaccatgcccaccatgcgcgccttcggcaagcgcatgatcgagaacggcatcaagcccgagtacgagtgcttcgagctgggccatatcgacaccgttctgggcatggccaagaagggcgaggtccccggcgatcccatgcagttcaacttcgtgctgggcgtgcacggctgcacccccgccactgtggagaacctggcgttcttcgccagcaagatcccggccaacgctacctggaccgtgtccggcgtgggccgcgctgcctggaccatggccgctgccgctatcgctatgggcggcaacgtccgtgtgggcttcgaggacaacatctatctgggcaagggccagaaggccgcgtccaacggcgagctggtggccaaggtcgtccgtatcgccaaggagctgggccgcgagatcgcgacccccgctgaggcccgcgagatcctgtccctcaagcccctcaagtaagcatccgaaagaaagaattataaatatattttaggaggaaatttatcatggctgaactgaaaggcaacaagtacggtacccaccgcgttatcgagcccaagggcgttctgacccaggctgcttggaagatcgacaacgacatgagcaaggtctattccaacgagatcgtctgcgatgtcacctccctgaacatcgactccgcttccttcactcagatctctgaggcctgcggcggcgacgagaagaagatcggcgaaatgatcctgggcatcgtcgctgagcgcggcaagcagcagaatcccgttaccggttccggcggtatgttcaagggcgttgtcgctcacatcggcgaggacctgaagaagaagcccggcttcgacctgaaggaaggcgacaagatcgtctctctggtctccctgtccatgaccccgctgaagatcgacaagatcctggccatccacaaggatatcgaccgcgtggacatcgtcggcaaggccatcctgttcgagtccgctctgtatgccaagatgcccgatgatatgtccgagcctctggccctggctgctctggacgtggccggcgctcccgcgcaggcccgcaagctgccccacgagggtgacagcgtcctgatcctgggcgccaacggcaagtccggcgttctgtgcggttgggaagctatgaagaaggtcggccccaagggtaaggtcgtgggcgtcgtccgcaaccccaagcaggtccccggcctgatggagctgggcgtgtacaccgacgtgatcgtggccgactgcaccaagcccgttgaggtcatggaggctgctctggctgccaacgacggcaaggagtatgatctgtccatttgctgcgtgaacatcgagtcctgcgagatgtccgctatcctgcccgtccgcgacgacggtctggtgtacttcttctccatggctacctccttcaccaaggctgccctgggcgccgagggtatcggcaaggacgtcaccatgatcatcggcaacggctataccaagaaccacgcgcagatcaccctggacgtgctgcgtgagaaccccaagctgcgtaagctgttcgacgagaagtactgctaaacgaaactgaccgaagctgggtgtccccttcgggggactcccagcctttggcgtacctaaaacaacgatttttgtgaaggagaaacgacatgaaaactcgcaatggtttgtttgctgacgttcccgaaaatctgtggaacgactggcattggcaggtcgctaaccgcgctgagacggttgaggatctgaagaagtacatgaccctgacccccgacgaggaagccggcgttgccaagaccctgggcaagctgcgcatggccgtcaccccctactatctgtccctgatcgatctggacgatccgtttgatcccatccgcaagatggctatcccccgcgctgaggagctggagtatgccgactatgaggatgccgatcctctgcacgaggacaccgactctcccacccccggcctgacccaccgctatcctgaccgcgtgctgctgctgatcaccgaccagtgttccatgtactgccgccactgtacccgtcgtcgttttgccggtcagaacgactgcgaagtgcctatgcagcagattgacaagtgcatcgattatgtggccgcccaccccgaggtccgcgacgtgctgctgtccggcggtgactgcctgatggtcgaggacgacaccctggagtacatcatcaagcgcgtgcgcgccatcccccatgtggagatcgtgcgtctgggctcccgtacgcccgttgtgtgcccccagcgtatcactcccgagctgtgcgccatgctgaagaagtatcaccccgtgtggctgaacacccacttcaacacccccaaggagttcactcccgaagccgccaaggcctgcgctatgctggctgatgccggtatccccctgggcaaccagtccgtgctgctggccggcgtgaacgattgctctcacgtgatgatggagctggtccacggtctggtcaagatgcgtgtgcgcccctattatatctatgcctgcgatccttccctgggcctgagccacttccgtacccccgtgtccaagggcatcgagatcatggaagctctgcgcggtcatacctccggctactgcatccccaccttcgtggtcgacgctcccggcggcggcggcaagacccccgttatgcccaactatctgatctccgagacgcctcgtaaggtcatcctgcgcaacttcgagggcgttatcacctcttacacccagcccgagcactatgttcaggattgccactgcgacgtctgcaccggcaagaagaaggtggagaagaccggcgtggcatgggtcgccgaaggcaccaagcagcgctatctggagcccaccaagctgctgcgtaacgagcgtcacgtcaagaagtaagagagaggaaaaactatggaaagcaaactcggcttgaattttgagctggtcaaccgtgcccgtgcctccgccgccaagatcgcggacgacacccagcactttatcgaccagcacaccaccgtcacggtggagcgcgctgtttgccgtctgctgggtatcgatggcgtcaacgatatggacgttcctctgcccaacgtggtcgttgaccacctgatggcaaactccctgctgcccgtgggtgccgcgtgggctatcggcaacgctatggtggagaccggcaaggatccccagggcgtggcagatgccgtgaacagcggcgagctggacctgagcaaggtccccgcccattccgacgcggagattcgcggcgccatcacccccgtggtgaacgctaccgtggagcgcatcaacaagaacgtcgccaagcgtaacagctacctgaaggcgtggggtgataaggaaggcccgtacctgtacatcatcgtggctaccggtaatatctacgaggatatcacgcaggccaaggccggtgccaagcagggcgcggacatcatcgccgtgatccgtaccaccggtcagtccctgctggactacgtgccttacggcgcgaccaccgagggcttcggcggtacctacgctacccaggagaacttccgcctgatgcgcgcggcgctggacgaggtgggcgaggagcagcaccgctatatccggctgtgcaactactgctccggcctgtgcatgcccgagatcgccgctatgggcgctctggagcgtctggacgtcatgctgaacgacgctctgtacggcatcctgttccgcgacatcaatatgcagcgcaccatcgtggaccagtacttctcccgtgtcatcaacggctatgccggcgttattatcaacaccggtgaggataactatctgaccaccgacgacgctatcaccgcggcccacaccgtgctggcctcccagttcatcaacgaggcctttgccaagaccgccggtatgcgcgaggagcagatgggtctgggccacgccttcgagatggatcccgccgtggaggatacgttcctgtacgagctggcgcaggcccagatggcccgcgagatattccccaacgcgcccctgaagtatatgcctcccacgaagttcatgaccggcaacatcttccgcggtcacattcaggacgccctgttcaacatggtgaccatcctgaccaaccagaagctgtgcctgctgggcatgatgaccgaggctatccacaccccgttcatgtccgaccgcgcgctgtccattgagaacgcgcagtacatcttccgcaccatgaaggatctgggcgatgagctgacctataaagagggcggcatcatccgtacccgcgccaacgaggtgctgaccaaggccaccgacctgctctccgagatcgagaagctgggcctgttcaccaccatcgagaagggcatcttcgccgacgtgaagcgtcccaaggacggcggcaagggcctggccggcgtggtcatcaaggacgacaaatacttcaacccgttcattgaagtcatgaaaggcaaggtgggagcatgagcagcggactgtataatacccataagatcgatttcgatacaacgctggatctgacccgcctgaagccctatggcgacaccatgaacgacggtaaggtgcagaccagcttcaccctgcccatcaaggatgatgagcgcggtgaggaggctgcccgccagatcgccaagaagatgggtcttgaggagcccaacgtggcctatcacaccgcgctggacaaggagttcaccttctatgtggtctatggcagctgcgtacactccgtgaactatgaggatatccatgttattactgtggagtccgatgtgatgagcatggaggataccaatgagtacatcaaagagcacatcggccgcaaggtcgtgatggtgggtgcctccaccggcaccgatgctcacaccgtgggtatcgacgctatcatgaaccgcaagggcttcgccggccactacggcctggagcgttacgagatgatcgaggcctataacctgggctctcaggtccccaacgaggaattcatcaagaaggcgctggagctgcacgcggacgtgctgctggtcagccagaccgttacccagaaggatgtacacatccagaacctgaccaacctcatcgagctgctggaggccgagggcctgcgcgacaagttcgtcgtatgctgcggcggcccccgcatcacccatgagctggccaaggagctgggctttgacgccggtttcggcgccggcaagtatgccgacgacgtggcgtccttcgccgtgaccgaaatggtcaagcgcggcatgaagtaaaaccatacggcaccactgggtcaactgcataggcagatggcccagtggttgctgtcataaaaaagtaggaggaacagaaatggcaaagaaacctgtattgactgccaaggaagcggcggccatgatccccgacggcgccacgattatgtgcggcggcttcctggcttgcggccaggcccgcgctatcgtcaaggagctggtggcccggggcacgaaggacctgaccctgatcgccaacgatatgggccgcgcgactggccccatgggcgaggagttcttcggcatcgcggagctgatccacaaccatcaggtcaagcgcgtcatcgcaacccatgtgggcatgacccccgaggtcggccagcagaacaccgagggtacgctggaggtcaatctgctgccccagggcaccctggctgagtgcatccgcgccggcggcgccggtctgggcggcgtgctgacccccgtgggcatcgataccctggtggaggagtcccccttctgcctgggccgccacactgtggacggcaaggattatctgctgatgaagcccatccacgccgatttcgccctgctgggcgcctataagtgcgatgagtacggcaactgctggtacaagggcaccatgcgcaacttcaacgtggtgatggccactgccgcagacaccgtgatcgccgagtgcgagtatatcgtccctgtgggcgacatcgagccggagaacgtccatacctacggtatgtgcgtgaactacatcgtggaaggagacagaaagtaatggaaaagtctgagatcaagggctttattgccaagcgctgcgccaaagagctgaaagatggcgacgtcgtgaatctgggcatcggtctgcccaccctgatcccccactacctgcccgagggcgtggagctgatcatccacgctgagttgggtatcgtctccgccggaaaggcgcccaaggagggcgacgagaactatgatccgtaccacgttgtggatgccggcggcagccccgcttccgtggcctatggcggcggcttcatcgactccgccagcaacttcggcctgatccgcggcggtcatgtggatgcctgcttcctgggcgcgctggaggtcgatgctgagggcaacctggccaactggatcatccccggcaagaagatgcccggcatgggtggcgccatggacctgtgcgtgggcgccaagcactgcattgtgtgcatggagcacaccgccaagggcaaccccaagatcttcgagaagtgccgtctgcccctgaccgcctctcactgcgtgaataagatcatcaccgagatgtgcgtgtttgaggtcactgacaagggcctgctgatgaccgagatcaaccccgagttcactgtcgatcagatcaaggaagccacggccgctcccttcgaggtcgccgttgacctgaagagtatgctggactgagtgaaaatgcgtatgactcccccggcgaagccgggggagttgtttttttgggggggggagcggtgagtgcacgatgatacctcatccgtcaacgctccgcgttgccacctgtctccctgcgggtcggtcggttcacgggtctgacacgccaccgacgtgtcattcaacaccgtgaacccctcgaggggaaggcaaggggctgggcggaccgatgcgggaatatttccaaaatgtggaaaaatgaaagaaatttgttaccgggaatggaggttttcggggaaaatgctgaaattggggtggacaaatgggaagaatgtggtataatctgtgtatccgcaggagtactcctgctttagcgttttaacagagattaaaacgaagcgtcctgcggaaatttgacctgaaaaggggtagaaaacaatgaagaaatgtataagcttggtgctggccctgctcatggccctggccctctgcaccgtatcttgggcagacacaactacggcgaaatatcctgatggcgtgaccgacgcttcctttgaaagcgcgcagaccgtgtactacacgaactatctgggcgaggtaaagtctggtggaactgaggattcggaaaagaccgctcttgtggcctatgtggatgccagcggcaacgtgcagtatgcggccgatgttaatgcggctatcgcgaatgacgcaacgacgatctattgtaaagctggcgcgactttgcgcatgcggcagagagcggtggataccaacagaacgctggacctgacgaaggatctgaccatctatgccaacggtgcgaacttccagtatggtgagatttctgtcaacatgacggatgcaggtaaggcggccaatgtgacggtcaaggtttatgatgccaagaatatcaaggtgtggggcgcgacccccaatgatggcgtaacccaaaccttctatctggagaactgcaccaacatcggcgagacggctaccggcgataagggcattctgatgtatattaccggcaacactggcacggtcaacgcgaccgtcaaggactgccacattgagaagaacagcagcggcatctacatgagtacaaacggtagcctgaccgtgaccaacaccgagtttgtgggttgtgctgcgggtgtcaagaccagctataagggtgccagaacgcgcaccgacacgattaccggctgcacctttaccaactgcggctgtgatgcagccgatgccggcaacaccagctggcttgcggatgacagctctgccatcaaagctaagaacggcggcaccggcacgatgaccgccactatcgacaacaataccatcacgggcaccaagggcggtaagggcgatattcaggtcatcagcgagacgaacaccgcagatgtcacggtgaagaacaccgctgccaaggtgactgtctcctacaaggaaaacaatgagcagctggtcgaggaaaagacgctgaccaaggataacaccctgaccatcaacgagaacggcggctccaatgttacccagcccgagcagaagccctccaacaactactactattacgcccccacccccgataccaccaccaagggctctcccaagacctttgacgcgggcgtgggtatctacgccgtgacggcggtgctgtcgctgggcggtatggcgtggacggcgaagaagcggcactaagtcaacaaaaaagaaagcccgtgagggctttctttttttgacatttgcgggggcgagggctgtgcctgcgggcggctgcgcttttatttttcgcccttggtcaggttggtcagaacggtcttgacgccctccaaaccctcgccggcggcttttttcacgccttcaagcccctcgccggcggcccttttcagctcgtccttcacgtccacggccagacggcggaatatctcggcgatgatcttctttttctcctcgtccgcgccggcgtactgcttcagcagcgccgcgccgccggccagaccgccgctgcggaggtcgtccagcgtccgggctttgccggacagagagagcacgtcaaacagcgcgtcggtgaactgctcacgctcggcgggggtcatggagccgatccactcccggagcacatcgtcggagagcctgcccatctgggaacgctggcccaggtggacaaagcgggtgcccaccacgctccaggacaggggctcgtgctgcatgatggaacggttggcgctgtcgataacggcgtagtcctcggcgtgttccagcaggacgcctacgatggaggactcggggatataggtgtgcagcttatcggccacccggcggtattccggggtgtccagcatatcctgggcgaagccggggccatcgttgttataggcggacagcaggcggtccttctgcagctcggcaggcagatagatggccgcccaggcggccagattgccgcccttgctgtggccgccgatacgcaggggcagggcggggcagagggacgccatctccgtggcgtaggacacggcgcgcgtctgggcggggacggcggagagaaagctcatgttgaagtcctctttccagccggccagagaggtgtcagtgcccatgaaggcgacgaacaatgtgccgtcgggcaccaggaaggagagcgcgtcgaactgcttggcgctctgttcgtcgtattcgtgggtatagccgaacaggcgcaagtcccggaagcgttcggtctgtgccgccagacgcagcagggggagatagctgagctcggagaggcccagctggtcatcctcgtcggtgagcaggggtgcgacctgggccagggtgggcgccgcggcggggtccttggtatggaccgcgtcgatgcggcggaagttgatataggagaggatgcacagcaccaggttgtccacctcgttgaagccgtcacgggcaaaggtcaggtcgccgcgccagcggaggtaatcgaagggtgtgccgttgacgggggccagctgtttgggtgtgttcttttccatatagacctccttgcgtatggtatatgcagtataccacactttgcccgcggccacaacgggcagcgcggcaaaaaatgtttggcgaaaaatgtttacagttgcggcgttgacgatgggggacttctattgtataataaactgatttattatggggagggtccgtctgtatgtggatcgcgaaggattggaaggattatgagctgctggactgcggcggcggcgaaaagctggagcgctgggaccggcaggtattggtgcgccccgatccccaggcgatctgggagacggacaagaccacgcggctgtggcgcggcgcaacaggacgctattcccggtcttctaccggcggcggtcattgggataaaggcaagctgccggaaagctggcaggtgcattacaaagacctgacatttcaggtgaagcctatgaacttcaagcatacgggattgttccctgagcaggcggtaaattgggacttcgccatggacaagatacggcatgccggaaggcctatccgggtgctgaacctgtttgcctacaccggcggggctacggtagcctgtgcgagggccggggcttctgtgtgccatgtggacgcggccaagggtatggtggcctggggtaaggagaacgcccggctatccggcctgggcgaagcgcccatccgctggatcgtggacgactgcgccaagttcgtggagcgtgagatacgccggggtaagacctatgacgccattatcatggatccgccctcctacgggcgcgggcccggcggcgaggtgtggaagttagaagacaatctgtatccctttgtggagctgtgcagccgggtgctgtcggacaagccgctgttcgtggtattgaacagctataccacggggttggcgccgtcggtgctggggtacatattgcagatgctggtagggcggaaattcggcggcacggtcacatgggacgagctgggcctgccctgcacggaaagcggcatggcgctgccctgcggcgccacgggaagatggttttccgagtaaacaagaacggaagtaattgcgtatggcagtgatgatagagacaaggaacctgacctatacgtaccctgcgccggagggggagacaaatcctccagccctgcgggatgtatcggtacagatcgaaaagggcagctttacggtggtgctgggccacaacggctccggcaagtccacctttgccaagcacctgaacgcggtgctgctgccgtgcggcggtgccgtgtatgtggacggaatggacacgcgggacgagaagctgctgctggagatacggcggcggacgggtatggtgttccagaacccggacaatcagatcgtggccaacgtggtggaggaggatgtagccttcggcccggagaacctgggtgtgcctacggcggagatacgccggcgggtggacgacgcgctggcggcggtgggcatggagcaattcgccagccacgcaccgcacctgctctccggcgggcagaagcagcgcatcgccattgcgggtattctggccatggagccgaagtgcatcgtgctggacgaggccacggctatgctggacccggcaggacggcgtgaggtcatcgacaccgtgctgcggctgaaccgggaacagggtattaccgtggtgcttatcacccatcacatggtcgaggcggagcgtgcagaccgagtgatcgtgatgaacgacggcgaggtagcgatggacggtatgccgcggcaggtgttctcacaggtggagcgcctgcatgaactgggtctggcggcgccggatacggtggagctgctgtaccggctgcggcaggacggagtagatgtgccgctggaaagcctgacggtaggcgagtgcgccgataccatttgccgcgctttcggcggggcggaagggaagtaacattggaaccgattttgcagatagaggacctgacccacacctattcggcggggacgccgttccagcgcagcgccgtggaggggctgagcatgactgtgggcgcaggggagttcttgggcgtgatcggacacaccgggtccggtaaatccacgctgatacagcatctgaacgggcttttgcagcctacgtccgggcgtattctcctggaggggaaggacatctgggcggatccgaaaaaaatacgggacgtgcgcttcaaggtggggttggtgttccagtacccggaataccagctgttcgaggagacggtgtataaggacatcgccttcggaccgaagaacatgggcctggacgcggaggagatcgaccggcgggtgcgggacgcggcagcctttgtgggactgcacgagacgctgctggacaagtcgccctttgagctctccggtggacagaagcgccgtgtggctatcgcgggcgtcatcgccatggaaccgaaggtgttggtgttggacgagcccacggcggggctggatccccaaggacgggacgccatcctcgcccagatacaggcctatcaccgcgccaagggcgcggcggtggtgctggtgagccacagcatggaggagatcgccagaaatgtggaccgcatcgttgtgctgtccgacggaaaggtatatatggagggcacgccgaagcaggtgtttgcccgggctcatgaactggagcaggtggggctggacgtgcctcaggtgacgaaggtggccgccgcgctgaaagcgcgggggctggatatcgatacagcggtatacaccgtggaggcgctggagcagaagctgctgacgctgagggggggtgcgtctccgtgctgaaggatatcacactgggtcagtttttcccggcggacacgccggtgcaccgactggaccccaggacaaagctgctgtgcgtcatcctctacatcgtggcgctgttcagcgccaaaagcgtactgacctatggaatcatgatcacggtgctggcggtgtcggtgctggtgtcgcgggtgccgttcaagtcgttgacaaagggcttgaagcccgtctattttgtggtggccttcacggccgttatgaatatgtttttcaccgccggtacgccggtggcggatgtttggctactgcggagtatcacctgggagggtgttgtagccgccgtgcagatggtgctgcggatcgtgatgctcatcatgggcacatttttgatgacgtacaccaccagtcccatcgccctgacggatggtatggagagcctgctggggccgctgaaaaagctgcgcctgccgatccacgagctggctatgatgatgtctatcgcgctgcggttcattcccacgctgatcgaggagacagacaagatcatgtcggcacagaaggcccgcggcgcggactttgagacaggcaatatcttccggcgtgccaaagcgttggttcccattttggtgccgctgttcatcagtgcgttccgccgtgccgatgaactggctacggctatggagtgccgctgttaccacggtggtgaggggcgtacagccctgcgggtgctgcggtataaggcggcggactggcttgtgctggtggcgttcctggcgctgacggcaggcattatcgttttgaaaaagcttggcttttgagtgagaggaggcggggcctatgcggaatatcgcgctggtattgatgtacaacggcaccgcctatcacggctggcaggtgcagaagacggagacctctgtggcgcagacgctggaaaagggcttgtctatggtgtgcggccatccggtgaaggtcatcggctgcgggcgcacagatgccggcgtccacgcggagcactatgtggccaatttccgtacagagtcgcggataccggtggatcgcctgccctttgcggtgaatacccatatcccggaggatattgtggtaaaggcggcctatgaggtagccgatgactttaacgccatcgggtcgtgcatccaaaaggagtatacctaccgtatctacaactcccggatcaaaaaccccttttacgttcaccgggcgtatttctatcccaagaaattggatgaggacttgatggaccgggcggcccggatgttcgaggggacccacgatttcgccgctgtgcggagtgtggggaccaacgtgcggagcaccgtgcggactatccactactgccgtgtgacgcggaatggggaactgctggagctgaaggtatgcgcggacggtttcttgtataatatggtacgtgccattaccggcacggtgctgtacgcggcggaggggaagctgatgccggaggacatcccggagatactgaattcgggcaaccggacgctggcggggcccacggcaccgccgggagggctgtatctcacgcgagtatggtatgaggatgaacggttgaatggataacaacaccaacaactggaaagagtttgccctgggcgacgtccaggaggagcatccccggcgtgtggccaagcgcagccggaagccgctgctggtactgctgatcgtggcggtactggcggtagcggcggtgacggcggcggtgctgctggaccgcagcggttttgatggcctgcgccgcaaggtcatttacgccaaggcggtgaaggatgagaccggctgcgctcagctgtatcgttacagcagcgaccagtcgggtcattttgcctcgctggagggcagccttgtgtctgtgtccatgcaccaactgacggtgctggatgagcagaacaagacgctgtatgacgaggcggtgaagttccagtcaccggcgttgtccgtcggcggcggacgtgccgcagcctatgacgtgggcggaacggtggtatacgtcctgtcggataagggcctggtgtacacactggactgcgccggagaggtgctcagtgcatcgttgaataccaagggctggctgactgtggtgtgcagtgaaagcggctgcaaggccgcggtacgggtctatgacggcaacggagaagcggtgttcgccttcaagtcgtcggaccgctttgtgatgacggcggcgctgtccgccgacagccgtaccttggcggcggtgaccatggggcaggaaaacggcacgtttgccagctatgtgatcttctaccgggtgaacagtgatcaggaggtcggacgctgcaccctgcggggcagcgtggtctatgatctgatggctgcgggaaccgggttctgcgccgtgacggaggagcagttgtgcttcattgacggcagcggcgtgatgactgccgcctatgattacggcggagactatctgcggcgggtcagcatcagcggcgacggctatgccgctctgctgctgggccggtaccgtaccggcacgcagcaccgtgtggtgacggtgaacagcgagggtcaggagttggcatcgctggagctggacgcggaggtcagcagcctgtccgctgcgggacgatacgtggccgtgctgtgcagcgaccatctgacgatctatgataagcagctgcttcccgtggcggagctggaggaggtcagccaggcacgggaggtgctgatgcggagtgacggctcagctgtgctggcgggaagtaccgccgcaagcctgtatctgccgtaaggtgtgacagggcgagtgccctatgtgaggtgatcaccaatgagtggaaatgttggaatatttgtggatctgattttactggcactgctgctgatcggcttggtgctgggttggcggcaggggttcgtgcaggcgctgacgcgtatcatcgtggtggtggcggcactgctgctggccagctggatcgccggaaagctggcggagccggcggccagatggctggagccgatcctttcggagaagctggagcagcggctgacggcccagggcaacaccgacgacgccggcgagatgctggcggccttcggctttgagggcgatacactgtcagagctggtggacaacgctgtggagaaggcccagcaggcgggcgagacgctgctgagcgctgtggtgtccaccgcgctgaagtctgcggcctacgcggtggtgtatgtgatgtcgtttttgctgctgctgcttttgctgcggctggtactgacaccgctgcatctgttcacaaagctgcccgtggtccacggcgtcaacgccctgctgggcggtgtgctggggctggtaaaggcggcactgctgctgtttttggcagtgtgggtgctgcagaagctgcagctgctggtgacgccggagctggtgaacaaaacggtgctgctcaaatttttcgcccagaacagccccatcgatctgatcgctaagctgtgaaaacggctataatggatatgctttttttgataagagataacggaggaaaaccatgcaaccgactctttgttccaaatgtaagaagaatgtggccgttgtgttcatctcccggatgaatgagaagaacgagatggtcaacgagggcctgtgccttaagtgtgccgcccagctgggtctgccccaggtggaggacatgatgaagcgcatgggtattacgccggaggacctggagaacatcaacagtgagatgatgcaggccttcggcggcgcggaggagctggatgcgccggtggacgagggcgaggaagatgatgaggaaagcggcaagaccgctacgttcccgtttctgaaccgcctgttcaacaacggcagcaatccgccggccgagcagcagccgtcccagaacggcggcgccggacagcaagggaccggccgcaagacggagaaaaagcgcaaatttctggataactactgcatcaatctgagccaacgtgcccgggagggcaagttggatgccgttattggccgggagcaggagatcgagcgcgtggtgcagatcctgaaccgccgccagaagaacaatccctgcctgatcggcgagccgggcgtgggcaagaccgctatcgccgagggactggcgcagcggatcgtcaagggcgaggtgccgttcaaattgcggcagaaggaggtctatctgctggatctgacggcgctggtggcaggtacgcagttccgtggccagttcgagagccgtatgaagggcctgatcgaggagatacgcaaggccggcaacgtgatcctggtcatcgacgaggtccacaacatcgtgggtgccggcgatgccgagggcagtatgaacgccgccaatatccttaagcctgcccttagccggggcgagatacaggttatcggtgccaccacgttcaacgagtaccgtaagcacatcgaaaaggacacggcgctggagcgccgcttccagcccgttaccgtcagcgaacccaatgtagaggatacgctgaagatactgcagggcattgcccactactatgagcagttccacggtgtgtccatcccgcagggggtgctgcgccaggcggtgctgctgtccgagcgctatatcacggaccgctatctgccggataaggctatcgacctgatcgacgaggcctgctccgaccggaacctccacgatccggagatcaaccgccatatggagctggaacaggagctgtccaatttgatctttgagcgcgagaatctgatgtccgcccagccgtcggacggtcagcagtttaccgagcaggagcttgaccagcggtacgagcgcatcgcggagcttcgcagccaggaactgcgggtgacggatgagctgaatgccatcagggccaaggggatgccagaactgaccatggagaacattgcccgggtcatcgagatgtggacaaagatccccgccagcaagatcaaggaagaagagttcaagcgtttggcggagcttgaccagcggctgcgcgcccatgtggtgggccaggacgaggcgatcgccgccgtgtccgccgcgatccgccgcaaccgcgtgggtatttcccccaagcacaagccggtgagcttcatctttgtggggcctaccggtgtgggcaagacggagctggtgaagcagctggctgacgatctgttcaatgcgccggagagcctgatccgcctggatatgtccgagtttatggagaagcactctgtctcccgtattgtgggcagtcctccgggctatgtaggctacgacgaggcggggcagttgacggagaagatacgccgcaagccctactccgttgtgctgttcgatgagatcgaaaaagcgcacccggatgtgctgaatgtgttgctgcagattttggacgacggacagatcacagacgcccacggacggaaggtgaattttgagaacaccgtcatcgtgatgacctcaaatgcagggtccgacactaaatccgccggtgcagtgggcttcggcggcagcgctgacgaccagggcagggagcgaatcatgaaggcactgcaggacttcctgcggccggagttcctgaaccgcgtggacgagatcgtgtgcttcaaccacctgacaaaagagaactttgccgggatcgcccgtatcatgctggatgagttgaaagcctcgctgggcgacaagggctataccctccgctatgacgaggcactggtggactatttggtagagaaatcctactctttgacctacggcgcccgaaacctgcggcgcctgatccaaaaggagctggaggaccccatggccgcccgtatcatcgatgcgttcgaacatcccattacgcagatcagcgccaccgtacgcgacggcgcggtgcagctgtacacattgtgaggtgagtctatgctgtttcgcaaggatatggacccccggtgcgcatactgtgccaaaggaagccgcattggcgaggacaaggtagcctgcgtcaggcggggtgtcgtgatgccggaggaccactgtggcgcgtttaagtacgacccattgaagcgggtaccgccccggccgatgaagctggatacagacaagctgcgggaagaggattttcaactgtaagcacaataggcagccgccggctgcccgtgcagtgaaaggaaaatggcatgactgttaaaaaagtatgggctgtgtactttagcgggactggcaccacgaagaaaacagtcgatcgcatcgctcgccgtctggcagaagcgttgggcacagactgcgaagtgtatgactacacgctgcccgccgcacgccgacaggagctgaccattccgtccggtgatgtggccgtagtgggttgtcccacctacgctgggcgcgttccaaatctgctgatgccgtacctgcgggatatggtgcacggcgagggtgctttggcggtgcctgtggtgctgttcggcaaccgcaattacgatgacgcactgatggagctgtcgcagctgctgacggctgacggcttttcctgcgtggccggaggggccttcgtgggggaacacagcttttcccgtaccttaggcgcgggtcggcccagtggggcggatgtgggggagatggatgcctttgccgagcatgtggccgccaagctggtagcgggagatactgcgcccgtcaccgtgggcggctgcgaccccatacggccctactacaccccccgtgaccgtcatggtgattctatcaatatcctgaaggtcaagcccaaaacggatgtgacaaaatgcgggggctgcggtctatgtgctgcccggtgtcccatgggaagtatcgacccggcggacgtgtcccgagtcaacggagtgtgcatcaagtgcggtacctgtgtcaagggctgtcccaccggcgccaagtatttcgatgaccccgggtatctataccacaagagcgaactggaggagatctacgcccggccggcaaagaacgaggtgtttctgtaagtatcaaagaggcaggcggcggagataatacataagctgtgctgatgacgtgaagccttccattccaagtggacaaaatgtggaattgaccgttgacaaaaggcacagtgtatggtagtctaacaaagctgtccgggagggcagagcgcgtgtaaagcgagtcaatgaaaaatgtctaaaaaaggtaaaatagtagttgacaagatggcagacatgtgctaagataatgactgttccgcggttatgggacgtgtaccttgtaaattaaacaacgaacgaaacgaaaagcaccagacgggagcacattgtaagatgtgcaactgaaaacttggcggagccgggttaagtcaattaccggtaaagctaagtataaaaagttttaagctatgacaaatagctctgtaaagatttaagcggctacggtcgtttagatacgatttatagagagtttgatcctggctcaggacgaacgctggcggcgtgcttaacacatgcaagtcgaacgagaatctgtggaaagaggattcgtccaattgaagcagaggacagtggcggacgggtgagtaacgcgtgaggaacctgcctttcagagggggacaacagttggaaacgactgctaataccgcatgacacataggtgtcgcatggcacttatgtcaaagatttatcgctgaaagatggcctcgcgtctgattagctagttggtgaggtaacggcccaccaaggcgacgatcagtagccggactgagaggttgaacggccacattgggactgagatacggcccagactcctacgggaggcagcagtggggaatattgggcaatgggcgcaagcctgacccagcaacgccgcgtgaaggaagaaggctttcgggttgtaaacttcttttgtcagggacgagtagaagacggtacctgacgaataagccacggctaactacgtgccagcagccgcggtaatacgtaggtggcaagcgttgtccggatttactgggtgtaaagggcgtgtagccgggagggcaagtcagatgtgaaatccacgggctcaactcgtgaactgcatttgaaactactcttcttgagtatcggagaggcaatcggaattcctagtgtagcggtgaaatgcgtagatattaggaggaacaccagtggcgaaggcggattgctggacgacaactgacggtgaggcgcgaaagcgtggggagcaaacaggattagataccctggtagtccacgctgtaaacgatgaatactaggtgtgcggggactgaccccctgcgtgccgcagctaacgcaataagtattccacctggggagtacgatcgcaaggttgaaactcaaaggaattgacgggggcccgcacaagcggtggattatgtggtttaattcgaagcaacgcgaagaaccttaccagggcttgacatcctactaacgaagtagagatacatcaggtgcccttcggggaaagtagagacaggtggtgcatggttgtcgtcagctcgtgtcgtgagatgttgggttaagtcccgcaacgagcgcaacccctattgttagttgctacgcaagagcactctagcgagactgccgttgacaaaacggaggaaggtggggacgacgtcaaatcatcatgccccttatgtcctgggctacacacgtaatacaatggcggtcaacagagggatgcaaaaccgtgaggtggagcgaacccctaaaagccgtcccagttcagatcgtgggctgcaacccgcccacgtgaagtcggaatcgctagtaatcgcggatcagcatgccgcggtgaatacgttcccgggccttgtacacaccgcccgtcacaccatgagagtcgggaacacccgaagcccgtagcctaacctaacggagggcgcggtcgaaggtgggttcgataattggggtgaagtcgtaacaaggtagccgttcgagaacgagcggctggatcacctcctttctaaggagacctgtcagtgccgacagcaattacatggcgcgcgcagcgcgacatataattcactcaaaagtcggaacaaacgctggcggacatcctggtcagacgtctgggcaaacgcgaaagcgtttgcggcgatgtgcaaagcacagcgcgcgttcgttgtttaatttagagggcacaagtccctgggctgtggatatgggcccgtagctcagctggctagagcgtacgactgataatcgtaaggtcggtggttcgagcccactcgggcccaccaacagtctaaaagagatagatggggatatagctcagctgggagagcgcctgccttgcaagcaggaggtcgccggttcgatcccgactatctccaccaatttcgaattgaagatggatggaagcggacaagaggttgtacgtttcgatctggtttcaagcgagactggaaattgcaccttgaaaactgaacaatgaagaatgtgatgaaagcaaggcaacagagaggtctttcaacgaaagttggaagaagtttgtaaaacatttaattgtggaacatctgaaaagatgtgggtatacaattacaattttgcgaagtaacctgtagattgcctgcataattcaagagaaccaaaatctcttagacgaaagtcgacgcgaagcgtcaccttaagtgtcgtttcacaaaccagcgaagcgtttgtgaaacgaagaagaggcgacgcgatggaatgtatgagttctgttgtttacaacagaacgaaggatatgcaatccgcgtcgcctcaaggtcaagctataaagagcgcaaggggaatgccttggcatcaggagccgaagaaggacgtgacaagctgcgataagcttcggggaggagcaaatatccgttgatccggagatttccgaatggggaaacccaccagagcaatactctggtatcgtgcgttgaataaaataggcgtacgaggggaacgccctgaactgaaacatctaagtaggggcaggaaaagacatcaaccgagattccgcaagtagtggcgagcgaacgcggaggaggccaaaccggtggatttattcaccggggttcggactggcatcacgatcagaggtatctagaagaacggcatgggaaggccggccatagagggtgagagccccgtatttgaaagagaagactgacagccagtatccagagtaccgcgggacacgtgaaaccccgtgggaagatgggtggaccaccatccaagcctaaatactacctgatgaccgatagaggagcagtaccgtgagggaaaggtgaaaaggaccccgggaggggagtgaaagagaacctgaaaccttgtgcttacaagcactcaaagcacgttaatgtgtgatgaggtactttttgtagaacggtccggcgagttatagtaacgagcaagcttaaggtattcagtaccggaggcgaagcgagagcgagtctgaatagggcgcataaagttcgttgccatagacccgaaaccgggtgacctaaccatgagcaggctgaagtgagagtaaaatctcatggagggccgaacgcacgttcgttgcaatgaccggcgatgacttgtggttagcggagaaattccaatcgaactcggagatagctggttctccccgaaatagctttagggctagcgttgatttagattaccggaggtaaagcactgaatgggctagggggcgataagcttactgaaccctatcaaactctgaatgccggctaattgatgatcagcagtcagacagtgtgagataagtttcattgtcaaaagggaaacagcccagacctacagctaaggtcccaaatgtatgctaagtggaaaacgatgtggagttgcgaaaacaaccaggatgttggcttagaagcagccattcattaaaagagttcgtaatagatcactggtcgagtgactctgcgcggaaaatataacggggctaagcatgcaaccgaagcttaggatgtccgcaagggcgtggtaggggagcgtcgtgtacggggtgaagtcgcagcggaagcagcggtggactgtacaggagtgagaatgccggaatgagtagcgagaattatgtgggaatcataatggccgaaaatctaaggtttcttggggaaggttcgtccgcccaaggtaagccgggagctaaggcgaggccgcgaggcgtagtcgatgcacatacggtagaaattccgtagccaccgaactttaaaccagaaggacactttcagatagcgggacccagccgttggtagagctgggcgcaagggaccgaaatatagtagggaagtccgcgatgctgggaggcgagaaaagctctggtgtacactaaggtgcccgtaccgcaaaccgacacaggtagatgaggagagaatcctaaggccaacgggagaagggttgttaaggaactcggcaaattgaccccgtaacttcggaagaaggggagcctcgaaagaggccgcagtgaataggcccaagcaactgtttaccaaaaacacaggtctatgctaaatcgaaagatgacgtatatgggctgacgcctgcccggtgccggaaggttaagaggagagcttagcgcaagcgaaggtttgaattgaagccccggtaaacggcggccgtaactataacggtcctaaggtagcgaaattccttgtcaggtaagttctgacccgcacgaatggcgtaatgatttgggcactgtctcgacagcccgcccggcgaaattgtagtactggtgaagatgccagttacccgcaactagacggaaagaccccatggagctttactgcagtttaatactgggaatcggtaattcatgtacaggataggtgggagactgagaagcatggccgtcaggtcgtgtggagtcaccggtgggataccactcttggattgctggtttcctaacctgcggccctgaatcgggtcgggggacactgttagacgggcagtttgactggggcggtcgcctccaaaagagtaacggaggcgctcaaaggttcgttcagcacggacggaaatcgtgcattgagtgtaaacgcataaacgagcctaactgcgagaccgacgggtcgagcagtaacgaaagttggagttagtgatccggtggtatgtgagtggaaatgccatcgctcaacggataaaagctaccctggggataacaggctgatctcccccaagcgtccacagcgacggggaggtttggcacctcgatgtcggctcgtcgcatcctggggctgtattcggtcccaagggtttggctgttcgccaattaaagcggcacgcgagctgggttcagaacgtcgtgagacagttcggtccctatctgttgcgggcgtaagagatttgaagggagctgtccttagtacgagaggaccgggatggacgtacctctggtgcaccagttgtcctgccaagggcatagctgggtagctatgtacggacgagataaacgctgaaagcatctaagcgtgaaactctccctaagatgagatctctcatccattatggagtaagggcccagaaagacgatctggttgataggccggaggtggaagcgcggtaacgtgtgcagctgaccggtactaatagcccgagggcttgacctacaatttgcaggcaatcttagccttctccgttcacttcttcattgttcggttttgaaggtgcaaaccttcaattgaatagttggtgctgattagggcgagggtccacccgttcccatcccgaacacggaagttaagctcgcttctgctgacaatacttggctggagacggcccggaaagataggtagcgccaacacaaagaaccacgacatctgtcgtggttctttgcttttcttcgacgaggtcccgccggtgggaatgctgctggcgggggcttttcttgtgtgggggcgttcggcgttttggatattcaacgaagtgagcaatatctatttctttacagtgcatatttgggtgtagtatactctttgtgggcaattcgtccctacacttcacctacgaaagggcgggcatgtatactatttattcccgtgattgatcttatgaatataatccttgcgtttgatcattcctccactactatttttgtcccggatggatacgtctcagatgttgagcatcttcgcgcatgtttttttgattggctatatgataatcctcaatacatgacatgcgatgaaaaggggcacgctgtatgcgcctatgacgcaatggcatttttagcttatatcaatcaggtcatccttcgctcaagtaatgaaaaggcgtatgtgattccagcgacacaaacgcgcggtaaactctatcgtctggaattctgacatcgaaaatccgagctatagtcttgtccagcatccctccgccagcgcgccgtatatcaccgggcaggggagggtatacacaaggggctgcagcgctgcggtgggatcctccagcacatccgcttggttgatgaacagtatgtcgaagttaccctccttcgccagcacccgggcggcaatggccggggtgatgaccgcctccggggagacctccgccaatgatgcgtacagctccgggcggtgggcggcgtcctgtatgggctgtctcagcgcggaggcaccgaatacgcagacggtgcggtttcgttccggtggcagtactggttcccaggcggcgtgggccttggcgggcaggcgcttggagccgtcggcctccaccagcacaaagtccgcggcgtactgccagccggggaagtccggggcggtcagtttgccctccgggttataggacccggcgcagacgatggggctgtgggcaaagccatcacacagctccgctgcggtggcggcgaagggacaccagtccgggcgcatgatgtgggtggtggtggccagcagcaccgtgccgcggtgggatagctcctgcgccagcacgcgcagcagggaggtcttgccgccgctgccgatcaccgcggtcaggccgggacgaatccccagcagttcccataattccatgcctgtcaccacctttcatacccattgtaccacagaaatttcccgccgtaaacctcttgacaagggttgcttgtggtgttaaactgtgaaaagtaagaaaagttataccaatccaactgaaaggagcgagaatgtgagcagagatgagcgctactttatgagcagcgtcaagatcggccctaagggacagatcgttatccccaaggaggcgcgggatatgttcggcctgcagccgggagatacgctggtgctgatggcggacaagaaaaagggcctggcactgcagaccgtggataagctgaacccgctgatgaagacggtatttaacagtctgcccagcggggaagaggaggcggaggacgaatgaacgtactggaggtacagggcctgaccaagcgctacccggcgtttacgctgaatggggtgtcctttgacgtgccgcagggcgcggtgatggggtttatcggccgcaacggcgcaggcaagagcaccacgctgaagtccattctgggtatggtacacccggacgcgggtgcggtcagggtattcggcatggactacgcggagaatgagcgcgctatccggcgtgagctgggcgtggtgctgggggggatcgatttttaccccaaaaagaagataaagaccatcaccgatgtgacccgccgattttacgataattgggacgaggaaaaataccgccactatttggagctgttccatattgatgagagcaagcgggtggatcagctttccagcggtatgaaggtcaagtacatgatcgccttggcgctgagccacaatgcccggctgctgatactggacgaacccaccagcggccttgacccggtgagccgcgacgagctgacggagctgctgcgccgggtggtggcggatggtacgcgcagcgtgctgttctctacgcacatcacctccgatctggagaagtgtgccagccatatcgcttttatcaaggacggcgagctgcagtataccggatcgctggaggatttccgcggccattacagggacgtgggcgctacgctggaggatatcatcgtgcacgtggaaaggaggccgctggatgaagacgctattatataagcagctgcggctggtgtgccatcccatgacgccggtattctgcctgttcggcttcatggtcatcattccaagctacccctacaccgtcatctttttctatgtgatgctggggctgtttttcacctttctgaatatgcgggagcagaaggatctgtactacacagcgctgctgcctgttcccaaacgggacgcggtgaaggccggctgtctgttcacggcgctgatcgagctgctgtcgctggcggtgctggtgccctgcgccctgctggcggtccgcttgcagccggggaaggacaacctggtagggctggatcccaatctggcgctgtttgccgccgggttcctgctgtatgcggtattcaacgctgtttttctgccgtcgttttacgcgaacggctacaaggtgggcgtggcatttgtcaaggcgatcatccccaccacgctggcgatgatcgtatttgaggcgctgccccacttcccgggcctgacatggctggacgatctggacgcggccacccaggtgcgtctgctgcccgttctgatcgggagtatcctgatctacgtgggatgcatggcgcttacgttccggagggcggcggcgcagtatgaaaaagttgatctgtgaaagcaacgaccggctcacgccggtcgttgctttattagatcatccagtagggaggctgaggagtttgcccctcgggtaggggaatgaccacgtctgtccgcacgtcgccgtacagcgtcttgtgctgcgccatgatattttccaacggttcgacagtgccacacagcagcgcctgccagaccatgccgcaggtggacatgatataggcgggagtgaacccattgcgaatataaaactggatacgccgcagacgcagtgcgttttccgcgtcactgcctcctggcacaggaaactccgcctccgctaccagaggccgtccctgctgctccagccgcaaaagcatatcactgcccagcccttcgttacgacgagcgcgtgtggttcccagatagtccagcagtaccagaggtgttgtcgcatttttccacagggcggcgtaactcagcagctcatcttcgtcaaacagtccccatacctcgtaacgtccttcctccagcagacggagaatatcgggcagaggcttgcgttcctgcgggacaaaagcctcggatagctggtcgtgataccagcgggggtattcctttgcggttaacaggcgaaaatccatagacgttcctccttcagaaaattcatagacgttcctccttcaacagccgctgcatatcctccggcaggggcgcggtcacatcgatgaccgcgccggtgaggggatgcgtcatccgcaggtgatagctgtgcagcgccgggcgggcgatcagtgcccggtcctctgtgccgtagagccaatcgccggtcagcggatggccgatggcggccatgtggacccgcagctgatgcgtgcgtccggtggcaggcgtcaggcgcagcagcgcacggccctgagaggccgccagcacctcatagtgggtgtgggcgggttgacccagggggtcggcctgccgcttcagcagcgagctctcagcgcgtcctatgggcagatcaatgtcgccctctgccggggaggggatgccctcgcacacggcccggtactcccgccggaaatcgtccgtgtgcagcatggccatacatcgggcatggatgaagccggtctttgccacggccataacgccggtagtgccgcggtccagccggttcaccgcatggaagctctcactatgcagatagtgggccgcggcgccggcaatggtggctgtttcctctgtcagcgccgccggatgcacggcaatgccggcgggcttgttgataagcagcaggtcctcatcctcgtacaggatatccagagggaagtccaccggccggatgtgtgggtgttctcccggcagatcggatacgtccgccgccagcacatctccggggcacggcacgaagcgtacggtaacgggcgcgccattgacggtgatggcctgccggaatttcaaccggctgagaaagctgccggagatgccccacaggccatgcagcagctgttttacaggctgaccagcctccgcttcaatgacggtatgggtcagaacacgcatagacggcacctcctcttgctcttgaatgaaattagtatagcagaatttatgggaatatggtatactaacttcacaaaacgtgaaagcgagggctttttatggcatccaaggtatacttcgccgacttgcgggccgacgtgcatgaaaatctccagcagaagctgacccgtctgatgaagaccgccggtatgggcgatatcgactttcaggataagttcgtggccatcaagctgcactttggcgagccgggaaacctggcgttcctgcgtcccaactgggcgcggaccgtggcggattttgtgaagataaggggcggtaagccattcctcaccgactgcaacaccctgtatgtgggcgggcgcaagaacgccctggatcacatggacagcgccatgctcaacggcttcaaccccatgaccacaggctgccagatcatcattgccgacgggctgaagggcagcgatgaggtagaggttcccgtggtcggcggcgagtatgtgaagaacgccaagatcggccgcgccgttatggacgccgatgtgtttatctctctgactcattttaagggacatgaagaggccggcttcggcggctgcctgaaaaatatcggcatgggctgcggcagccgtgccggcaagatggaacagcacaatgccggcaagccccatgtggcgcagaagcactgcatcggctgcggccagtgccggaagatatgcgcccacggcgcgcccatcatcgaaaacggcaaggcccatatcgaccacgacaaatgcgtgggctgcggccgctgtatcgcagtctgtcccaaggacgcagtgcggatcgactgggacgagaccaccaccaatctgaactgcaagatcgccgaatacaccaaggcggtggtggacggacgaccctgcttccacatctcgctggtcatcgacgtgtcgcccaactgcgactgccatgcggagaacgatatggccatcgtgcccaacgtgggcatgtttgcctccttcgacccggtggcgctggacatggcctgcgtggacgccgtcaacgcccagacacccctgcggggctccgccgccgatgacgcgcacgccaaggcccatgtgcatgaccactttcagcggctgcacccggacaccaactggcgcagctgtctggagcacggcgagaagatcggcatcggcacccgggagtatgagttgatcaagatataaaaagcggaaagccacccgtcagggtggctttccttatgtatttattccgcatcatctgcggacgtttcctctgaggcgtcctcgtcctccgggtcgtcgatgtgggcgaaccactcccggtagcggtgcatatccttggcgaacagctgcccgttgctgggcggtgtgtaggtgatggcgttggccccggcggcaatggtggacaggatcgtctcctccgtgggaccgccggtggcgataacgggcagctccggatagcgggcccgtatctctgccacgatggcgggcgtcctgtccgcaccagagacgttcacaaaatcgatgcccgccgccagcttgctctccaggtccactttttccgacaccaccgtatagaccaccgggatctccacggtggccttgatggcccggatggtatcgtcgtcaatgaacgtgttgcacaccacgccgaaggcgccctggtgctcagcaaaagcggcgatgtgggccgaacgctggcccttggtcagaccgccgcctacgccaacgaacaccggcacatcggacacgccgataatggcctgggtaatgcctgcctggggcgtaaagggatatacggcgatgaccgcatcggcgttgatgttcttaatgatggccacgtcggtgctgaatacaagcgacttgatacgccggccgaatacgcggatgccgctgcatttgctgatacagtggggcacggtcaacgcgtgcttacgcagggtgccctcgtaagtggggacatatttcttcacagttccttcctttccagcaattaagcattttctcatttgagaacattatagcagaaaaaggacgcagtgtaaaggaaaaccatgcggtttttaacagatcgttcacaatgactattgcgcgggaaagtgcagaaggcagcgagggatcatgccttggtgagataggcgcggcacttgtcgttggccgccgccgctgttttttcctcgtccacggtgacgagacggcccgcccggacagtgacgcggccgtgtaccaccgtatagtccacggcgccccggacgcccacggtacccagcacagagccggcgtcctgatcacagcctaccagctccagccggcggctgtcgatcatgaacagatcggcgcacttgcccacggacagctgcccgatgtcgtcccggcccagcagccgcgcactgccccgggtggccattttgaggatgtcatagccggtgggagcctgacggctggcgtgcagccggtgcagcaagaaggctacccgcagttcctccagcaggcttgagccgtcgttgctggcgctgccgtccaccgccagtcctaccggcacacccagggccagcatttccgggatgcgggccacgccgctggcgagcttcatgttgctgatggggcagtgcgccacgccggtgccggtctgcgccagcagccgcagctcctcgtcgttgaagtggatgccgtgggcaaaccacacatcgtcacccagccagcccagccgcgccatgtattccaaaggccggatgccctcacgctgcagcatgaagttctcctcgtccttcgtctcgcacaggtgggtgtgcagccgaacgtggtactgtcgggccaggatagcgctctgacgcagcagctccgccgacacggagaaaggagagcagggggccagtgccacacggcacatggcgccgtagctgtcatcgtggtatttctcgatacagcggacgctgtctgccatgatctcgtctaccgtctgcaccacgctatccggcggcaggccgccgtccttgacgctcaggtccatgctgccgcggctcatgtagaggcggatgcccagctcccgtgcggcgctgcgctgtgcacccagcaggtcgccgctgtgggcggggaacacatagtggtggtcaaagcaggtggtgcagccgtgcttcatcagttcgcccatgccggtcaggctggacaggcgaattacatcctcatccaggtttttccagatctcatacagggtcttcagccagtcaaacagctccatattctgtacctgtggtagattgcgagagaatacctgatagaggtggtgatgggtattgaccaggccggggtagcacagcatatggctgccgtcgatgacctcgtcggcgctgatgtccagcgccgtaccgatagccttgataaagccatcctcacagtaaaggtccgcgttatgcagtacgcggtcttcgtcgtcgcaggtgaccagctggtgaatgttcttaatgagcagggtggacacggtaattcctccttatggtgatagatgggtaggaaaaaagagcaggccgcaagcggcctactcttttcattatcaggtcagcgttcctcgcggaagtaggagagaccgagggacgcagggggctgatcctcccgctttttacgcagggacacgatgatcagcacgatcagagtgatgacgtagggcagcatcttgtacagctccttgacagccatctgtgcgccggtgggcagatagatgttcagaatgtacagaccaccaaacaggatggaggccagaatactgacattgggacgccagatggtgaagatgaccagcgcgatggccagccagccgcggtcaccgaaggcgttgttggaccacacgccgttggcgtagtccatgacgtagtacagtccgcccaggcccgcgatcatggagccgatgcaggtggccagatacttgtacttggtgacgttgatgccggcggcgtcggcggtggaggcgctctcgcccacggcgcgcaggtgcaggccgggacgggtgtggttcaggaagtaggacgcgcccagagcgatgatgatggccacataggccaaaaagccgtaggacaggaacagctctccgaaccagccggtgctgtcggcgccgggcaacgtggtcttgaagtacagactggtgttggccagggcgatggagggaacctcgctgttggtcagcttgatgagggagccgccgaagaagttgcccacgcccacgccgaaggtggtcatggccagaccggtaacgttctggttggcgcggagggtgacggtcaggaagcagtagagcagacccatcagcagggagcccagcagggagcacaggatggggatcatgatggccagaaagccgttcagctgcccgccggcggcctgctcgtagaagaacgagccgataacgccgctgatgccgcccacgtacatgatgccgggaatacccaggttcaggttaccggacttctccgtgaggatctcgccggtgctgccgaacagcagggggataccctgcatgaccgcgcgggggaagaaggatacaaagtcgaagcccatccgttacgcctcctttttgctgctcttgcgcagagtgaccttgtaggtgatgaagaactcggtagcaatgatgaagaacagaatgataccggtcagaatatccgcgaaggactggttcaggctgaaggcggtggagatctcgccggcaccgcgatccatggtcaccagcagcagggaggcggcgatcatgatgaaggggttgaacttggacatccaggacaccatgacggcggtaaagccgcggctgtccacgatggtggtggtcagggtgtggctgatgccggcggtcaggatatatcccatcaggccgcagatagcgccggagagtaccatggtgcggatgatcacgcgatccaccttgataccggcatagctggcggtgcgctggctctcgccaacgacggcgatctcataaccgtgcttgctgtatgtgagatagatatacatcatgccggtcagcagggcgaccaccagaatggggagcagctgtgcctgtccgccgatgcggggcagccagccggcctcggaagcctggttgataatgccgatcttaccggcgcccttgggcacctcccagataatgataaagtaggaggccagctgcatggcgatatagttcatcatcagggtgaacagcgtctcgttggtgttccatctggccttgaagaaggcgggcaggaagccccatacggcgccggccagcagcgcagccgccagagagatgacgatcagcaggaaattggagaccttgccgcccagcaggatcatgcaggtggtggtggccaggcagccgatcagggtctgcccctcggcgccgatgttccagaagcgcatcttgaatgcgggcgttaccgctaaggagatacccagcaagacggcaacattctgtccggtgacccagattttacgggaggtgccgaaggcacccttgaggatcgtgccatagacggcgatgggatcctgaccggtcagcagggtggtgatcagtccgcagaacaccagtgccagcagcaggataccgccgcggatcagcagtgccttgggcagaggcagcgcatcgcgcttggaaatatgaaagagcgaaccttttttattcatctgccttgcctccttccacgcgggtcatcagcgcgcccacttccagcttgttggttttgcggccgtccaccacgccggaaacctgaccgccgcacagcaccacgatccggtcgcacagctccagcagcacgtccaggtcctcgcctacatacacaacggcgacgcccttcatcttctgctcggtcagcaggttgtagatggtgtaagatgtattgatgtccagaccacggacagcgtaggcagtcatcagcacggagggctgctgggcgatctcgcggcccaccagcaccttctgcacgttaccgccggacatacggcggacggggaagttggtgctgggcgtgaccacctccagctcctgccagatgcgctgtgccagcgcctcaggatttttgcggtccaggaaaatgctggcacccttgcgccaggagcggagcatcatgttgccggtcatgcccatggagcctaccagacccatacccagacgatcctcggggacaaagctcatggccacgccgctcttgcggatgtccatgggatccatgcccaccagatttttctcctcgttggtctccggggagatataggtcacggtgccggagctgacgggatacaggcccgcgatggactccagcagttcacgttggccggaaccggcgatacccgctacgcccagcacctcgccggcgttaacagtaaagctcacgttgtccaaacgcttgacgcccagctcgtcgaacacggtcagcccctcgatcttcagccggggctccacattcacgggggtggggcggttgatattcaacgacacgctgtggcccaccatcatgtcggtcagggactgctggtcggcgtccttggtcagcacgtcgcctatgtactcgcccttacgcagcacggccacccggtcggatacgtccagcacctcgtggagcttgtgggtgatgatgatgagggacttgccgtcggccttcatgttgcgcatgacggcgaacagcttgtccgtctcctgcggggtcagcacggcggtgggctcgtccagaatcagaatatcggcaccgcggtacagcaccttgacgatctccacggtctgcttctgggaaacagacatatcatagatcttcatgtccgggtcgatatcaaagccgtatttgtcacagatgtccttgaccttttgacgtgcattgttcaggtcaagcttgccctccaggccgaggatgatattctcggtggcggtgaacaggtcgaccagcttgaagtgctggtggatcatgccgatacccagatcgaaggcatccttgggagatgcgatggtcacaggcttgtcgtggacgtagatctgcccctcgtcggggaagtagatgccggagagcatgttcatcagcgtggtcttgccgctgccgttctcgcccagcagggacaggatctcgccttcgtacagttcaaggtttacatctttgtttgcgatgaccttgctgccgaaccgcttggtgatgttctccattctgatcgcgcatttcttttccaaggctgtcatcctttctttcggcgcagatggctgcaacacctcgaatacgccggggataaattccatacgacttattctaccatacatggtgagcgttgtaaatcaaaatcagcaaaaaatttgtcaggtatatacaaagaatgtgaggttacacaagaaagagtcattctctttgtgtaaatcgtcaaagccgcgtgcaggagggaaaaagcaagaggtgggctgcctgtgcagcccacctcgttgtggtgcaatatgctgttggaaaacctggctattagccgccgtagttgacatccagacggttgatgccgtcgatctccagatcgaagtaaggagcggaacgcttctcggactcagcgaagtaaccgtcatgcacgacctcggtgtcgggggtgttatcgctgtcggcgttgacgtcagcctggtaggaggtcagagtctcacccttcacagtgaaggtggagcaatcgaacacgtggatctcgcccttctccagcttctcggtagcagcggcaatggcctcggcagtgccttcggcggccacggtggtattcaggtcggtcaggaccacggagttggtggccagagtgccggtccagtcagcagcgatctcggtgccgtccatgacagccttgatggcatactcatagtagggcgcccagttgatgcgggaggagatgatgtaggtgttggggcaggcagcctgagtggaaccgttgtaggaaacgttgggaacaccggcgttctcgcaggcggtaggagcacccagagagtcggcgtgctggctgatcagcttgcagccgccctggatcagcttctcggcgccttccttctccagagtctcatcgtaccagctgccggtgaaggtcacgtccatggtgacggtggggcagacggacttggcacccagatagaaggaggtgtaaccggaaaccacttcggcgtaggtgaaggcacccacatagcccatcttggcctcttcagccttgatgtcgccggcatcgatcatcgcgttcagcttcagaccggcagcgataccggccagatagcggccctcatagatggaggcgaaagcgttgtggtagttggccagaccctcggtgtgagcgcgggtaccggtgctgtggcagaactgcacctcggggttcgccttggcgacctcgatcatgtaaggctcatgaccgaagctgtcggcaaagatgatgttgcagccggcatccaccagatcagcggcgacctcggcgcactgctcggtctcacccacgttggtcttgatgaagtaatcctcattctcgaccagacccaggttggcgcaggcttccttggcggcatcgatgaagttcttgtcataggtggagttttcatcatgcagggtgatgaagccgaccttgaccttggcagcggtagcatcaccgtcgccgttgccctgagtgtcgtccttcttctcaccgcaggccaccaggctcagagccatgaccagggcgaggagcattgcaaggaactttttcattcttgttttcctccttaaaatatgtgacgcacgcctgaaagtaaggcaaattttgacgtgcgtctgaacaacgggcgtccgcccggtattcacgcgactcataagaacgtgagtattatacaggatttcaccgccgatttcaacagaaaatgtgaattacggcaaaatttatttctgacgcacaaaaaatctttgtaaatcttgtgcagtatgcggcatttgatagaaatttcccgttccgaaatacccgttccatatggcagggataagcgcgttactgatgaatacgggtgccggtcttgccctcgataccgtccttggccttttcgagcagggtgataagggcggtacggccggccttggactcggcgaacttcaccgcggcctggaccttgggcagcatggagcccttggcaaactggttctcctccatgtacctgtaggcttcggcgggggtcagatcgtccagacccttctgatcgggcttgttgtagttgatggccaccttctccacggcggtcaggatgatgagcatatcggcgtccagcagctcggccagcagctcgctgccgaagtccttgtcaatgacggcaggggtgccggagagcttgctgccctcgcggatgacggggattccgccgccgcccacggcgatgaccacgtgaccggcgtctaccagcgccttgatgctggccttttccacgatgtcaaagggcttgggggagggaacgacctggcgatagccgcggccggcgtcctctaccatggtgtaacccttctcggcggcgatgcggtccgccgtctccttgtcataaaaagcgcccacgggcttggtggggttctggaaggctgggtcgtccttggacaccacggtctgggtcacgatggtagccacgggcttgtccatgccgcggctggccagctcattgccgatggcctgctgcaggtgatagccgatgtagccctcggacatggcgccgcactcagggaagggcatatcggccttgatggccttggcctcggcagcggtggacaggcccagattgatcatacccacctgggggccgttgccgtgggcgaccacgacttcattgcctgcagcgatcaggtccacgatggacttggcggtctcggtgaccagttggagctgctcagcggcggtattgcccagtgcgttgccgcccagcgcgataacgattctcttagacataatgctctacctcactgttttcatttttccatctccgcgtgcccattctgaagcgcaggggaaagggcgttttcggggcgaggaggagacggtgcttagatagtataacacagattgtatacagtacacaatatctatcacccacaacatttacacaaaaatgcggcaggggacagaaaatagcgggagggggagcccctcccgctatcgggtcgattatttagaacttcttgcgggtgtccttggtctcgtccagctccatcagggccttgacgggatccttcacctgggccatgaagatcatggcggcgatgatatagggcttgtaggaggcctgcttgtacagaggcacgatgtagcggtcgaacacggagttgtctacctcgccctcggcgcagctcagaccggtgatgtcggcgggcaggcaatgcaggtacagggccttgccgtccttggtgagcttcatcatctcttcggtgcaggcccaatccttgtgctgggcgttctgggccagcaggcgcttctccagtgcgtcaatgccctccttgtcgccggcggcgtacagcttggtgcgctcttccatggcggcataggaagcccagctcttaggatacacgatatcggcatccttgaaggcctcggccatgctgttggtcttgtggaacttggagccgtacttctcgcagttcttgcgggcgacctcttccacctcgggcatcacgtcatagccctcgggatgggccagggtcacgtccatgccgaagcgggtgaacaggccgatcacgccctggggcacggacaggggcttgccgtaggagggagaataggcccaggtcatagcgaccttcttgcccttcaggttctccacgccgccgaagtagtggatgacgtgcagcatatcggccatgcactgggtgggatggtccacgtcgcactgcaggttcaccagggtgggctgctgctccaggataccgtcgcggtagccttccttcacggcgtccataaaggtcttctgatacttgtggccctcgccgatgaacatatcatcgcggatgccgatgacgtcggccatgaaggacaccatgttcgcggtctcacggacggtctcgccgtgggcgatctgggacttcttctcatccaggtcctggacctccaggcccagcaggttgcaggcggaggcgaaggagaagcgggtacgggtggagttgtcgcggaagatggagatgcccaggccggaatcgaacacgcgggtgctcttgttgcgctcgcgcaggtcgcgcagggcgtcggccacggtgaagatggcgtcgatctcatcatcggtcttgtcccaagtccaatagaaatcagtcttgtacatattgttgatgttcagggtagacagatggcgtgccagttcaacagtcttgctcattttgatcgttctccttgtatgtttaatatagcgtatatggcgtatgatcgattacttgatgtcgttgccggtcagctcctggcggaagctggtggcggagccgtccttgttctcgggcttgtacaggccgggaacggcggcgtacagggcggcgcaggtcaccaggtcctgcttgaaggtcacctcgttgggagcgtgcgcctgggactcggcaccggggccgaagcccacgcaggggatgccgtagcggccctggatggacacgccgttggtggagaacgtccacttgtcggtcaggggacggccctcgcgcttggaggcagccagctcggtgggcatcaaacgcttgtcgccccacaggttgtggtgggcgtccaccagggcctggacgtgaggagcagtctccttgttgatccaggtggggaagaagcactcagtctcatatacatggccggtccatgcgggacggtcatacatatacatggacaccttcacgtccttggcatacttcttgcaggcgggcaggtcctcgatctccttcaggcaggactgataggtctcgccggcggtcatgcggcggtcgatggagatggcgcagctgtcggccacagcgcagcgggagggggaggtgtagaagatctggctggtggtgcaggtgccgcggcccaggaagcgggcgtcctcatagtgctcggggttgaacttgggatccagcatcttcaccaggccgttgatctcggtggagccgtcggcggggttctcgttcaggtcacggacgttcaggatgacctcggccatcttgtggatggcgttgtcgccgcgctcgggggcggaaccgtggcaggacacgccgtgcatatccacgcggatctccatacggccgcggtggccgcggtagatgccgccgtcggtaggctcggtggagataacgaattcgatcttgctgcgggcgtcctcaggaccgttgaagtactcattgacgatggactgccagcacataccgtcgcagtcctcctcctgcacggagcccacgaccatcatcttgtagcccttgggcagcaggtccagatccttcatgatcttcacgccgtaggcggcggcggccatgccgccctcctggtcggaaccgccgcggccgtagatgatgtcatcggtctcatagcccttgtaggggtcggcttcccagttttcgatattgccgatgccaacagtatcgatgtggctgtcgatggcgatgatcttgtcgccctcgcccatccagccgatgacgttgcccagcttgtcgaactccaccttgtcatagcccagggccttcagctcctcggcgatgcgcttgacgacgccctcttcctcacaagactcggaagggatggcgatcatgtcccgcaggaacttgaccatagcgggtttgtacgcctcggcggcgtttctgatggcagcaaaatccataatgtacctccgcaaaaattttatcaaattctgtgttaaaaacgggtaaacggtttttaccatctcctatcatagcacatggcggccggatgtcaaacaaaaatttaggaaatcaaaaagtttttcagaaaaaaccgttgctttttgtgggaggtgtggtattatgtaagaggagaaaagcggaaaaggagggtgttatggaggcgaaacgattagaatcgctgaagcagatcgccgcgggcatcgcggcgcagttcggcgacaagtgcgaggtggtcatccacgatgtggccagcagccacccggagcacaccatcgtacacatcgaaaacgggcacgtgtccggccggaagatcggcgacggtgcatccagggtcgtcatggagcagctggagcatcagaacgagcagccccaggaccatctgtgctacctgacgcggacgccgggcgggaagatactgaaatcctcgtccctgtatatccgcaacagccgcggcgcggtcacggccatattttccatcaactatgacatcaccaacatcatgatgatgcaccaggagctgggcgagttcatgctcacccgcgaccgggagcagtccgagccggagaagatcatcaacgtcaacgatgtgctggacgagctgatccagcagtccgtggcgctggtgggcaagcctgcggccctgatgaacaaggacgacaagatccgggccatccgcttcctcagcgatgcgggcgcgttcctggtcaccaagtccggcgacaaagtggcaaaatacttcggtatttccaaatacaccttatattcctatatcgatgcgaacaaacaacaggaggaaaagaaacatgggtaaaatcgatctgtccatcaacaaagtcggtctggcgcataacatccagaaggccaaggagaacaacgtcatcatccccaccatcgcccagatgcagaaccccgacctgatccccgagaagatcaaggccaagctgagccacaccggtctgtgggatgtggatcccgtcaacctgttccgcatttcctggcacaacgaggccaaggagtccggcggtctgttccaggcggtccccaactatgtggagatccccagcaagctctccggcgtgccctgccgcatcgttgccatgtccggcaagtggttccccaccggctgccacaaggtcggtgcctccttcggctgcctggctccccgcctggtgaccggtcagttcgatgccacctatcaccacgccgtgtggccctccaccggcaactactgccgcggcggcgccttcaactccaagctgctggcctgcgagtccgtggccatcctgccccaggatatgtccaaggagcgttttgactggctgaagtccatcgccggtcagatcatcgccacccccggctgcgagtccaacgtgaaggagatcttcgacaagacctgggagctgaagcaggatcccaccatgatgatcttcaaccagttcgccgagatgggcaatcccctgtggcactacaacgtcaccggctacgccctggccgacctgttcgaggccatcaagaagcccggccagaacttcgccggcgcctgctttacctccggctccgccggcaccatgtccgccggtgatctgctgaaggagcgctatccccacctgaagctggccgtgggcgaggccctgcagtgccccaccatcctggataacggcttcggcggccaccgcatcgagggtatcggcgacaagcacatcccctggatccacaacgtgaagaacaccgatatggccatcgccatcgacgacgaggacagccagcgcctgctgcgcctgttcaacacccccgagggccagaagtacatgaaggacgagctgggtatgtccgacgaggaagtccagaagatgacctggctgggcatctccggtatcgccaacgtcctgtgctgcatcaagatggccaagtactacgagctgaccgagaacgacgtggtgggcaccgtgctgaccgactccgccgtgatgtaccagtcccgcgtggaggagctgaatcagatgtatggcgcgtacaacgcacatgaggcgtctctggaccacaacctgcacatgctgggcctgaagaccgactccatgctggagctgacctacaccgagcgcaagcgtgtccacaacctgaagtactacacctgggtggagcagcagcagatgaacgtggaggacctgaacgcccagtggtacgataccaagaacacctgggacgccgtccacgcacaggccaaggagctggacgagctgatcaatgagttcaacgaggccaccggcctgctgaaggcgctgtaagaaaacaccgcaacaacgcctcagggcggggcgaaagccccgccctgtttgtttggaaggcagatatgcaggaacgaaaatcgcttcggctgccggcatatgattattcgcaggccggcgtgtattttataacgatctgcactgcggggaagaagcacattcttggacgtgttgtagggggcggcgtcctcgacgccccacacgtctgcctttcggatcacggaattatcgcggagcagacgctgctgaaaatgaatgatttttacggggatatttccattgataaatatgtggtcatgcccaatcatgtgcattttatcatcaccgtggctgcacacggcgggtcgtcgaggacgccgacccctacgaatgcaaaattgccggcttttgtttcgacatggaaacgatttaccaataagaaggcgggcgtttccctctggcagcgttcctattatgaccatgtcatccgcaatgatgcggactgcctccgtgcatggcaatacatcgacgacaaccccgcgaagtgggcggaggatgaatattattccgattaaggagaaccaccatgaaaaacgtaaaatacggcaaatgtgtccgctgcggcaagacctacgacgccgttcccgacctgaccaactgcgaatgcggcggtatcctggatatcgtctatgactacgactacatcaagtctgtgctgaccaaggagaagctggccaagcgcgagaaccgttccatgtggcgctaccgtgagctgctgcctgtggaggagaccacgcccgacacgccgctgcgcgtgggttggagccccctgtacgaggagccgaagctggcggagctgctgggcatcaagcgtctatgggtcaaggacgacggccagaaccccaccgcatccctgaaggatcgtgccagtgccatggccgtggccaaggccatggaggccggcgccaagaccatcgcctgctcctctaccggcaacgccgccagctccctggccggcaacgccgccgccgcgggtatcaagacctatatcttcgtccccgagcgcgcccccaagggcaaggtggcccagctgatgatcttcggcgccaacgtcatctccgtcaagggcaactatgaggacaccttcaagatgtccgccgccgccattgacaagtacggctggtacaaccgcaacgccgccatcaacccctacctctccgagggcaaaaagaccgtggcgctggagatcgccgagcagctgaactgggagatgcccgactacctggccatctccgtgggcgacggctgcacgatcgccggtgtgtggaagggctttaaagacctgtacgccatcggcttcatcgacaagctgccccgcctgatctccgcccagtccctgggctgctaccccatcaaccgcgccatccaggaggacaagccctgggagcccatggaggagaacaccatcgccgactccatctccgtaggcgtgccccgcaatgccgataaggccctcatggccatccgcgagtccaacggcatcgccgtcaacgtctccgacgaggagatcctggccgcccagcgcctgctgggccgtacctgcggcgtgttcggcgaacccgccggtgtcaccggtgccgcggcgctgaagaaggcctgcgatgagggcctgattccccacgacgccaccgtggtgtccgtggtcaccggcaacggcctgaaggacgtggccaacgccatcaagtccgccggcgagcccattcacatcgagcccgacctggatctgatggtcgaggagttcaagaagcgcggcgtcaccgtggagtaagatgcagcatcccccggcaaatgccctgcatttgccgggggattttctcttgccaatccatcaggaatgtggtacaatagcttccataatacagctcatatagccccgcgagaatggcgcgggcgtttctacggagccgccgacggctctgctatgggtgtttcgatgcacgacatcggagcatccatttttattttgcttgcaggaggtatctcaccatgacacaggtcttacgcggcaatatcgtccatgcgcccgccatgggccgcctggacattctcgagcacggctgcctggtgctggaggacggcgtcattaccggcctttatcccgatctgcccgcccatctggagggcgcggaggtccgcgacttcggcgaccgcatcatcatgcagtccttcgcggatatgcatctccatgcgccccagtaccccatgctgggcatggggatggacctgccgctgctggactggctcaacacctacacgttccccaccgaggcgcggttcgctgatttggactacgcccgccgtgtctaccgtcggctggctacagacctgatcaccaacggcactacccgcgtctgtatgttctcttccctccacaccgacgctaccctcgtcctcatggacgagctggagcgcgccggcgtcaccggctatgtgggcaaggtcaacatggaccgcaacggcctgcccggcaagctgcaggagaccacggaggagtccgtggccgagactctgcgctggctggagaactgccgttttgagcacatcaagcccatcctcacgccccgctttactcccagctgcaccgacgggctgatgacccagctgggaaagctggccaacgagcgggggctgtacgtccagtcccacctgtccgagagcaccaacgagatcgcctgggtgaaggagctgcaccccgagtgcagccagtattgggagacatacgacaagtacggcctttggaaggaccacacactcatggcccactgcgtctggtccgacgagcgcgagcgcgccgccattcgtgacgccggtgtggtggtggtccactgcggcgactccaacgtgaatatctgctccggtatttgccccgtccgccgcatggtcaacgagggcctgtgggtcaccctgggcagcgatatcgccggcggcgcccaactgcccatgtacaaggtcatcaccatgtccatccgtacctccaaggcccgccgtgtcaccgacgagcagcaccccgaattcctgaccgtggccgagggctattacctgggcaccacctctggccacaagtatttcggggcaggggagggcttcgccgtgggagataagctccacgccgtggtcatcgacgacggcgacttccccgaggccgcccatcccctgaatgtggaggagcgcttcgagcgcgccatctacatgacccaccgccacaacatcgtctccgtctggtccgacggccgcgaggtcgtccgcagataaagtgaaaaatgaccgggtatcccggtcatttttcattttccatgccagaattattgcaaaaaacccttgtcaaataggaaatctttgttataatgaaaccaaccgacagggtggcagaggtaccttgacgcgttccggttatacgtttaagggctggaaaatgaatggttccaccgaagtatactccagccagcagatcaagaattggaatggaccgttgggtgacacaaatcgtctcaccgcggtctggtccgccaactcctattactactactcccccactacgaccgacaccaagaccgactcgcccaagacctttgacgcgggcgtgggcatctatgccgtgacggctctgctgtccgtgaccggcatggcgtgggccggcaaaaagcggcactaagtcaacaaaaaagaaagcccgtaagggctttcttttttgctccgccggcagacagaaaagcggccgccatcaggcggtcgctttcttgataatgatctcgttctccatcaggtcgatcttctcgatctgcccatttaccaccgtggggatacccatgatatcggtgaacaccagctgcccgtccttctgtgtcacggacgccacgtttttgcacaccggctgccgttccgccgtccatactgtggaaagacacatcgtttattcctctcctttcaggatccgcagggcctccgccagcttctcgttgcccacggtcaggtccaccactgcctcgtgcagcagctgcgcggcctcgccctctacgctgtgggccagctcgtgcagttcctcggcgtggtgctggttatgcgtcaccatgtacgccagcagcgccaccgtctcctccggcgagtggtgctcatgcgtatgcccgtgatcgtgcccgtgctgatgggtatgggcgtgtgtgtgcggcgcgtctgcaccggcatgatcggccgaatgtacggccgctttctcgtcaatcgtacacatatccgcacctccgtttttttctgtgctcattctaccacggcggcactgaaaagtcaattttcctccccaaatcgtcaaaaaaccgacgataacagacatatctcctgaaagtgtccgaaatctgtgcaaacaacacaatttcattgacaaattttctgcaattatgtataattttactggataatactgcgcgttccgcgcagcaaggaggacgagagatgagggaccttaaacatctgatttactttgagaacctgctgcaagaggccaataacgacctggtgaagcaggcgaaaagtgacggaaaactggctttaggctacacctgctatttcatgccggaggtgctgctggacctgcccggctgcttctctgtgcgcctgcgcgccccccgctgcacatcccctgatatggcgacctattatatgtcttcccgcacctgtcactacggccgcagccttcttgagcgtgccctggagggcggcttcaatttcctggatgcccagctggctaccgagacctgcaccgtgacctgccgttttcaggagcacctccagcgtatggatatcatccagaatgagcgcttcaagtgcgagttcatggatgtcccgttcaaaaagacggaaaacagtattgaccattacgaggcacagatcaaggcccacgtcctggatttcctccatgacaattacggcgtggacacctctgacgaggccctgcgccagaccatcgagagccacaacgagctctgccgtattatgcaggctatcggcgatcaccgcaagctggacgtgcccaccatcaccggctatgagtaccatgtcatcaacctggtgaccctggcctgtcccaagtacctgatcatcgacaagctccgcgagacgctggaggagctgaagacccgtgagccggacgccagaccccagtaccgctgcaaggtcctgctggccggcagcgagaacgacgacccggactttaccaagcttatcgaaagctgtggcgccctggtggtggcggaccgctactgctacggcggcatggagtcccgtctgcccatcgagatccgggaaggggagacgccgctgcgtgccatcgcccgccactatctgctcaccagccagtgcacccgctttatggagcagcatgagatgcgccagcgcaagcagcacatcgccgacctggcaaaggcgtacaaggcggacggcatcatcgtggcctccaacaagttctgcgagtactggagctatgagcgtgtcatcgataccgtcgttctccagcgcgacttcggctatcctgtctgttccatcgagaaggagtatatcaacgcggccagcggccagctgcgtacccggttccaggcgttcattgagagcgtggagatcaagaagatccaggagggcgtgaagagatgaagaaatttgatctgaaaaacgtggtggagaaggtcaagaccacggattataaaaagctggctaaggatttctggtacggcaaaccccacggcgagcgccgcctgggcgacctgtactgcgacaagaccggattgtacaagcaccgcgagtggcgcggtgtgaaggacaccttctactatttcaacaaggtgtggctgtacaactacggtatgctggtctacgatgtgatgcgctacggcggcatctggacctttgccaagggctgctggcgctatcgctggatgggccagacctatctgcccgtgctccactggttcgaccgcggcatggagggcctgcggggtgaggcgctgcgcgcctgtccgctgcactatcgggccatgaccaacgccactatctaccagttcatgcagatgttccgcaacgacctgaacaccaacaaggggaataagaaggtccaggcgcggcacgacaagaccatcgcccacgacgagacggtgtggggcggcattttctatcccttcagcaaggaagtggagaacgtccccctgcagatgatcccctatttcgtcacctgccatgtgaacaaccacacggtcctcaactacatcgacgcggtgcagtccctgggcctgcccggcgacccctgccccatgtgtcaggccgaggccggactgttcgtgctggatgatgtgcccgactactacaaggcggtcatcacctccaacgaggcctgcgacggctccgtggccacgtccatcattcaggactggctcatcgacaagcccctgttcgccatgccccagcccatgcagttcgacgatccgctggtccacaagcactgcatgaaggagatcgaggaggcgtggaagttcatcgaggagcagaccggcgttcccttcgactaccagcagctgtgtaagaagctggagagccagaacgagctccagcgcttcgagtgggagaagtgggatgtggcggccaacaccaattattatcccatcaacggcgtgtcccaggcgctgtaccgtatttaccagtctcagtacggcgatctgcccatctggcacgagacggacaagaaggtccgcaagatcatggagaagtgcgtggagcagcgcatcaacaacttcccgctgacccgccaccgcgtcattgcctggtcctgtgcgccgctgtactattccaactggtgcacctgggcctataactgctggggcctgaacaccatcatgaacatggactccctgatgttcgacatgaccctccgcaccgacggctacgagcacaccctggaggacatggcgacctaccacgagtgggcgccgatgcgccgcatggctgtgggtggtatgcaccacatcttcgagctgtgggagaacatggagcgcttccactgcgacatggtcatgatgtacgaccagctgctgtgcaagggtatgcagggcgtccacggcctgttcgaggatgagttccgcgcccgcaatatccacgccatctggatgccccatgccctgcccgacaagcgtaatgtctcccgggccgagatccgcagcatcatcaacgactacatgaccaccgtcatgcaggaggagccgctggatccgtctttgctggagttcgacgattctatgagctggtaagaggaggaagagaacatgaaaactgtattcaagattttgaaaaaggtcgtcctgatcggattgggcgtctacgccgcactgttcgccgtgttcttcttcgacctggacggcaaggcgctgttctacggtgtggagccgttcctgtgccgccattacgaccgcatggagcgccgcgatccgctgaagcagaagtacgatatggacaagccccgatacgagtataacaagtgaggcgatacccttgagcgaacacaaccatacccacacccatgtggacgagaacggccgggtctatgagcacagccacggccaccaccattcccatgcccagaccaaagccgtgctgaaccggctcagccgggcacagggccatctggatgccgtgcggaagatggtggagcgcggtgaggactgcgccgaggtgctggtgcagctcagcgcggtgatctccgcgctgaacggcacgggccgcgccattctcaaggatcacatcagccactgcatcgtggatgcggtggaggccggtgaccaggaggccatccaggcgctgaacgatgccatcgaccgctttatgcggtagcgctccggacaccggcggcagaatgtctgaataccgccctgcggcattgacagcggcagggcgggggactatactaaacgtgagtgacagagagggaggaagactatgatttccggcatcgtctacacatccaattccggctacacggcgcagtacgcccgcctgctgggtgccgcgctggatctgcccgtgaccgacgccaagtggggcgccgatccccatccgggcagggcggtcatttacctgggctggctcatggccggcaaggtccagggatatgcgaaagcggccaaagaatttgatatccgcgccgtctgcgccgtgggcatgggtcccgccagccaggccggggccgagaaggtccgggccaagatgggcattccggcggaggtgccggtattcaccctgcagggcggcttcgatatcaacaagctgcacggaccctataagtggatcatgcagctgaagtgcaaagagatccgcaaaacgctggcggggaaggccagtctcagccccgcccagcagctgacctacgacatggcgaccaagggtgccagcgccgtcagcgcggagaacctgacaccgatcatcgactggtataaaacgaaggagggctgaccatgaggaagtttttacacatggcgggcggtatcgccaaaaagacgctggccactgctgcaaagctggcgaagaagctggcgcacatcgtattgcaggctgccggcgcggcggtgtccgccgtgggcagggctgtgaaggacctgctgggcaaggcggcctgcggcgtgggcaaaaaggtgcagaagttcattccaccggtgtgcaaggtcgtgatgatcgtgtccggcgcggtggcgctgctgtcctgcgtgggctggctcatcagccgcaaaaaattcgcgtaagcgaaacgcgtataccacagggagatgcgccggggcgcatctcccttaaacaaagccccgcgtttccacgcaccgcgcagggaagggcgggggagagcaaaggagatctgagcaagtatgaagaaaaaggcattcaaagcggagagcaaacgcctgctggacctgatgatcaattccatctatacccacaaggagatattcctgcgggagatcatctctaacgcctccgacgctatcgacaagctgtgctacctgagcctgacggacgacaaggtgggcttgaaccgggatcagtttgagatcaagctgtccattgataaggagcgccgcctgctgaccgtcagcgacaacggcatcggcatgagtcaggaggagctggagaacaacctgggcgtcatcgcctcatccggcagtctgaagttccgccaggaggtggagggtgacgagagcgccgataccgacatcatcggccagttcggcgtgggcttctactccgctttcatggtggccgacgagatcaccgtcatcacgaagaaatacggcgaggaccaggcctggaagtggcagtccactggcgtggatggctataccattgagccctgcgagaaggatacggtgggcaccgatatcatcatgcacatcaagcccgacaccgaggaggaaaaggacgaatacagccagtacctgcgggagtatcccctgtacaagctggtgaagaagtattccgactatatccgtttccccatccgtatgcgcatgccccatccggagctgaaggagggcagcacccaggagaaccccgagtacgaggagaagttcgagtgggagacgctgaacagcatggtgcccctgtggcagcggaagaaggccgacgtcaagaaggaggagtacgacgagttctatcagcagcgctttgcggacagccagccgccgttgagtgtcatcaccgtctcagccgagggcgccgtgacctataaggctctgctgtttataccagagaaggcgcccctgcgctactactccgaggagttcgagggcgggctgcagctgtactccgccggcgtgatgatcatggacaagtgcaaggagctgctgcccgagtgcttcaactttgtccgcggtgtggtggagtccccggatctgaacctgaacatctcccgtgagcttttgcagcacgaccgccagctgaagctcatcggcgccaacctggaaaaaaaggtcaaggccgagctggagcgtctgctgcgggacgaacgcgagaaatatgagtccttctggcagtccttcggccgccagatcaagctcagtgccatggacaactacggcgagaagaaggatatgcttcaggatctgatgctgttctattcctccaccgagaaaaagctggtgacgctggacgagtacgtctcccgtatgcaggagggccagaagtacatctactttgcctccggcgacacggtggacgctgtggaccacattccccagacggaactgctgaaggaccggggcatggagatactctactttaccgacaaagccgacgagtttctgtccgatatcctgagatcctataaggataagcccttccgttccgccaccgacggcgatctggacctgcccggcgaggccgagaagcaggaacaggacgagcagcagtacaaggaggcctttgcctttatcaaggaggccctgggcggtcaggtgagtgaggtcaaggcctccgctcgcctgaagacccacccggtctgcctttccagtggtgagggcgttaccttcgagatggaaaagtacttcacggctgcccagccggagttggggctcaaggccaagcgtattctggagatcaacgtggatcaccccgccttcctgaccttcgaaaagacccggctcaccgacccggagaaagccaaaaagttcgcccaggtcttctacaaccaggcacagctgatcgccggtctgcccatcgacgatcccaccgcctacaccgacctgctctgctccctgtggcagtagatcatcagaaaaagaatgaccgccgtgaggcggtcattctttttccaaaacgacaaaaaatacggcgcaaatagttgcaaaaatagttgaaaaatgctaaactataaatagtgtgtgaaccagcaagacccacgacccaaatccggggagaagtccccattgagaaggagttttgcccatgaaagacttgaagcacctgatctggtttgaggaccttttgcagcaggccaacaacgagttggtccagcgcgccgcggcggagggccagctggctctgggatataactgctactatatacccgaagtgctgctgaatttgccaggctgcttttccagccgccttcgggcccccaacagcggcaccgcagagatcgcgtcctactacatgacaaaccgcaactgtccctatgtccgctgtatcctggaacgggccatcgagggcggcttcaactatctgaacgctctgttcggtgcggagggctgcgccgccatggagcgcatggaggagcattttaccctgctgaagccggtgaagaacgaccgcttcatcaccaccatcatcgacccacccatgaaaggtgacaggaccagcctggattactacaaagcccagctgaaagcaaaggtgctggatgccctgcgcgacagcttcggcgtggacacctccgacgatgcgattcgtgccgccattgaaaagcacaaccgtctctgtcgggtcatcacggagatcggcgacctccgtaaggcggaaaacccggtcatcaccggctatgaataccacgtcatcgtcctggtgagtcaggtctgtccccatgacctgattttgccgtatctggaggagacgctggcggagctgaaaacacgccggccggaggcggaattccccttccgtgcccgtgtcgtgctggccggaagcgagatcgacgacccggaatttaccaagctgctggagagctgcggtgccatggtggtggcagatcgctattgcttcggcaccttcccaggccgagaggagatcgagatccacggcggcgagacggccttcgacgcggtgtgtcggcactatctgcaccacaaccagtgcgtccggtttatggacggcgccaagatcgaccagcggcacagtgagctgcgccgtctggcggaggactacggcgccgacgggatcatctacgagagcatgaagttctgcgagttctggagctatgaaaaggtgctggccagccacgtgcttcagcaggagatgggcatcccctgctgcaccatcgagaaggagtacaccctgggcagcgtcggtcagctgcgtacccgcttccaggcctttgtcgagagtctggagatcaaaaaactgggccataaggaggtgtgaccatggtactgaagcagtggaccaatgccgtcatcggcgtgatcgataaaaagctggaacgctttgaccccaagtggcaggcagctaacggcaagggcggtcttcgcagccgctatgaggataagaccggtatcgcccgccaccgggagtggcgcggtgtgaaggatacctttgtggactacaccgcctggctgaacaacctgctggccatgggcaaaatggtggcctccgccccggtgccgatcctcaagggcttctgggagtaccgttggatgggctcctatctgggcaccttcgcctttattgaccggctgtttgagggctaccgggaggacgagctgaagatcgcccacatgaatatgcactgtatcgtcagcagcctcacgaaaaagatcgccctggtcctggccaacgacaagcgtctgggcggcggaagggacagcgacaacatcgttcccatggacgaggtcatgccgcccctgtttatgaccggcttccccggcctgattcccatccccatccaaacactgccggagttcatcatctgtgacatcgaccaacacctggagccctactacatcgatgtggccgagtccttcggcctggccgccgacgtctgctcccgctgctcggcggagaccggcgttgccatcgacgacgatttccccattgtgggccgcgctgttctgaccaccaatatgccctgcaacgccagcgaggccacctccatgttccagcgccgccgctttggtctgccggatttccccgttaccatggccatgatccacaacgagcccggcgcgcacccctactccacccagatcctgcgggatgccatcgcctttattcaggagaactacggcgtcaagtacgactgggaggccctgttcacccgcgctgagcacatgaacgagcagaaccgcatcgagttggagaaatgggagctgttcaagacgccttactccgccctctgcggcattgccgagagtctgtatcggttatactcctgggcctctgtcaacggccaggaggaccagttcactaaaaacgaccgcaaggtgctgaagctcatgctggaggcttacgaacggaagcatgagcctttcgacggaactacccgccaccgggcgttcctgtggggcccctccgcggtgtattacaccgatttccccacctgggtccagaactgctggggcatcaatatcgtgctgaatatggactctaccatgggccacaacatgatctccaccaccgacccggaacaggccattcaggacctggccctgttctccgagaagggcgtcatgcggcatcatgccgttggcggctgggacaatgtcaacgctgtgtgggagtgggccagcaagttcaactgcgacatggtcatcttcaatgacaatgtggcctgtaagggcatgaacggcgtccacgctctcatggaggagcaggcccgtgacctgggcttccacttcatattcctggagcacgacctggaggactgccgtaccatctcccgccgggatatgcggaacaccgtcaacaaatacatgaccgtcgtactgaacgaggcaccgctggaccccacgctggtggactttgacgacagtctggcctggtaaggagggaaccatatgaaattcgcagctaaattgctgaaaagactgctcatcacggcagcactgctgtttgcgggcaccttcaccatctactatctcaatctggagaacaagctgatctacaaggtcatttatcctttcctgcaaaagcactacaacagccagcagcgtgaccgccgcatttgaaaagaagaaaaggatacccgccctccggcgggtatccttttgtgcaaaaggccgtccttcgatggacggcctttcggcacacgaacaaaaaagaacggccctgggggccgttcttttgcctgtggataggggagagggctcactccgtggtgtgatgctccttgccgaagtgcagctcgcgcatgccctctacctcgtcgcagatggccttcaggttgcaggaaccgcagtcggtgggcattccctccaggatcttcgtcaggctcatggtgatgtccttgaccgtcttggcgtccctggtcagcgccgcgtagtccgcctccggcgcggtgataaacagcagcttcaccgccagaatgttgcggttctgcttatactgccggataaagtccgcgccgatgcggcggaacgtcatgcccttctgcaccgcctcccggctgatacgcacctgttcccggctggattccgagctggtgcggatcatatagcccttggggaacacatggtacttcacaaagtccatgtcctggatggcccggaaggcctgctccgtgtcgtcctcgtcatcggactcgatatcgcccacccgcagcagagcgatgcgggcatagtggctgtcgccgttcaactcgtccaggtccggaccacagaccacgatctcgtccccgggcaccagctccgcagaggaggtcacacaggtgaaattcaccgcgcttttgccgctgccgcccagctcataggcggcgtcccgcagcatgaccaactcaaaggccccggtgtcctcccaggcctccgccgggtcataggcataccgcttgggcgtggaggcgccggcaagcgcctccacctcccgtatgatcggattatacagctccatcagaacttgatatccactttcttgcggtcaaagatcttgttgacctgcacataggcccagcccagcagcttctggtccaggttccagaagtacacgacgaacagtgcgcccacggccaccgccagaatacggatgagcttaaagagaaatttgaaaaccttacacatatcgtagcctccttaaatggcaagaggtattcaggcgcgggccatgcccttctgccgcgcgtactcggcggcgcccagcgcgcccatcagctggggatcggtcttcaggtcgatgaccttcagcttcagcacgtgctcgatggcctgcttcaaaccggcatttttggcgcagccgccggtcagagtgatggcgtcggtggcgccggccttcttgctcatgacgaagcagcgcttggccacggccatctggataccggcggcgatctcgtccatgggcttgccttcgcccaccagggtgatgacctcgctctcggcgaacacggtgcactgcgcggtgatggggatgacgttcttggccgtcagggacaggttggagaactcgggcagcgtcatctcgaagctgcgggccatggcctcatagaaccggccggtgccggcggcgcatttgtcgttcatggcaaagttcttcacggtgccgtcggtgtcgatggagatgcccttcacgtcctggccgccgatatcgatgatggccttgacactggggtcggtgacgtgcacgcccatggcgtgacaggagatctcggagatattctcgtcggcgaaggggaccttgttgcgcccgtagccggtgccgatcagatagcccagctcctcggaggagttcaagcccaccttgttcagcacttcctccatcgccagcttggcggagacctcggaattgatcttgctgcggatggtggtgtcggcgcagatcttgccgttctcatccagaatgaccgccttggtataagtggaacccacatcacagccgccgtagtatttcatagtcgtaaactcctttatatatgtagtagttgagaatattacatgcagttttcgtcgtcgaaatcgcagagggagggatcgatcggctcggcgcgcatgaccgtgcgcatgtactcgttgaccttgtcgcgcatggtcttgcgggagacggtgcggggatccatcaggtcatgctcgatccagatcatgtgatagccgcgctcgcggccctgctcgtccaggatgccctgtacggtggccatgttcttgcaggccacgttctggtacatgatgatgatgttggtgttccacgcctcgcactggcgccacagctcgtccaccacgttctggtagccgccgttggtgtgccggcgcatgaccatacgctcgtacagccgcgccagatcgcgcagggcctcctccttgtcctctgtctccaggggcttggtgaagttcagggattccatctccaccaggatgttgatgccccagcagttggccagccagttggagaagttggcgtagtagtgggcggggcagctccacacgatgccgcggtagcgcatcttgcccacccacgcctcgtcgcggcgctggtaggactgcatcagcaggtcgttgaccttgcggcaggtcttcatgacgcgcgggtcgataccgccgtccatttcgtagttccacttgcggaacagctcgtagctggggccgatgatctggggataggcggtcttgttgacctcccatttctccagctcataccgcgtctcctcgttaaagcgcttcatggcggagaaataggcgtcccagctccacttggcgccggtctgctcctcaatgaacttgatgcacgcccggatatcctcggcgcccatctgcaccgtctcctcgtcctcataccgaaccgggaagcacaggtggaacacgggcaggtcggggaagcggcgggacatatagctggaggccatagtggagccgtcgcagggcatggaggaggagataaagcacttgcccatgtggggcaaggcatcgatgaccagcgcgccgcactcggaggacggcaccgggcagcagtccgccggcaggccgaaggactccacggcgtcgatgtagggcacgcaggtgagctggtcgatctcggacaccaggaacaccggcatcagctgataggggatacccagcaggtcggggaagccggccatgatctggcccatggtcatctcatcgaacagaacgaccttcttgttcagctcggagctgttgccgttcttcttatcgcacttggccaggaacaccagattttccgccacatagcggaaaatgtcgtaggtcatcaggtggctcattttcagggcgttgccccgttgacccatggtgttcttatccatgaagctcacgcagcacatataggagatcatccagcgataccagaacgtggtgttcagggcgggtatcagatccttggagaaggtggccaacagcatgccccagaccttcagccagccggagaagtcgacgagggtgctctccacgccgcgccactcccggcggacagtggccatgtcacccttacggtacagggcacccagatgcttttcgccgttgagcagcaggtccttgcgctccgcgcaggtcatggcggcaacggtcttggcctcccgtgctacacggttcatattgtcaaggaaatgctccttctgtttcctgccaaaggctttccagtccgtctccttgatgagatcgagagcgatggagccaaactccttcaggttggcggcctgcgccttccagtccatctcagtcttggcgcggaagaattcgggattgggaaatttcttcttgtcagccatcagttggcacctccgttctgcttgtggagcttcttgatctccagcgactccacaaaggcctgcacgcgggtccgcagctggccggagttgccgttgttgtacagacggtcgatgctcagcaccggccagtcatactcctcatgcatgatgtggctcaccagcgcgcgctcaaagccccagtagtcgcagtatttcatctgctcatagatgatgccgtcagcgtgatactcccgtgccaggcggtccgccgtctcgcggcgctgctgcaccttctcatcggcgatgtagcgggcgcattcggagtgctgcatgatgtgcatgcagatctggggcagggcgtcctcatcgtccttcagctcaatgatctcccgcccgggagtggagccgaagcagtaccggtcggacactaccagtgcgccgcagccctcgataagcttcgtcagctgagggtcgtcgatctcgctgcccacgatggccacgcgggcacggaaggcgggcttgggatccggcttgcgttttttcagctccgtcagcgtctctcgcaggtaaggcaggatcaggtacttgggacaggtaaagctcaccaggttcagcacgtggaactcatagccggtgatgaccgggttttcctccttgcgcagctcgccgatctcgctgatgatggaacagacctcgttgtgctccttcaccgcctgacggatagcggcatctgaggtatccacgccgtacttttccgtcaggggatccagcacccggcggcgcatctgcttgacgtaagagtccagcgtgtagtcggtgatcttgtaggggatgtcgcagtgggtgacaaagaagttgggcttgtcattcatctgcagaatttcaaagtgctccatggcgcggttcatcatggaacaggcgtccacgccggccagcgcgtccaggaactggtagccgccctccatgccgcgctccaccagggcgcgcgcatattcacaggtgtagttggacatatagtaggtagcgatgtccagtgaaccggtgcggggggcgcggagccggacggagaagcagccgggcaggttcagcagcggctcaggcatatggtagcaggtatagccgatggccagcttcccctccgcctgtgcctgttttaccagatcattgtcggcattctccagcaggctctcgaagtagatcagatgcttcaggtctctcaagaattacacctctctcctaatgtatttcaattataagatctccagcttggtcagggcttcgcgtgcgccgcggatgacaggggcatcctccggcagatcaaaaacactaagaccctggatatcattggcggcgtgctgtgggtcgctgccgatggtggccagtatctccgtgccgttgatatggatgtagggaatcagcgccgggtccgtgacccgattgacgatagcgccgcagcggtcgtacatcaccagctcgtcggccacccgcttgatggtgtcgatgacctgtgtacccttgcggctgggatcggtgatgagcaccagatgcgtcaccttctccatcacccggcggttgatctgctcgatgccggcctcaccgtcgatgaccacgtagtcaaagtcgttggccagcaggttgatgacctccttcagataggcgttcaccttgcagtagcagcccgctgtctccggccgaccgatggcgagaaacgagaaccgctgctgctccaccatggtgtcgaaaatgcggtatcgtgcctcgctcagcagctcgatggcctcccggggcgcaccgtcctccaccgaggccacgatgctcttgcggatgtcgtccagcgtctctttcacctcaacgcccagcgcggtggacagtcccaccgccgggtcggcgtcgatggccagaatacgcttgtcggggtacgcctcggtcagcagccgcacaaaggcggcggagatggaggtcttgcccacgccgcccttaccggcgacggcgatgatcttgggggagtgctccaacaagtctcacgtcctttcgtgttacccgccgccgtcatttctgaccgaaatggcggctatgccacagaagtacgcgggtttgtgcagtattgttaaattcctaacatcatactaccacaaataccggcaaattgcaatgaaagtttcggcattttgctgcattttttggcagtattgcgccactggccgggggaaaggggcgtgtatattttgcggcgtttttacgcctttgcccctttgacgcggcggccataccgtgctataatacgggataaagtattatccccctcttgaaaggagaggctttatgcgtatcatcgatctggagaccattaaccaggccatgaacaacgagacgcagttcgtcctgcgctgcgaggaagtattccacgacaaggtatcctccgccgcggcggctgtcctgtccgccgggcgtgagcgccgcatcgtggcgctgaccggcccctccggcagcggcaagaccaccaccgccatgcgcctgcgcgactacctggaaaatctgggcgtcaaggtctgcctgctgagcatggacaactttttcctgcccctggaccagcgtccgctggaggctaccgactgggagtccccttactgcgtcaacgtggacctgctggtcagctgcatcggccgcctgctggacggcgagcaggtggatattccctggtacgatttcaagactggcactaccggcggctataagcccatgcagggcgacaaggagtgcattgtcattgccgaggggatccatatgctcaaccccctgattttcgataagatccgcggcgcggccaccggcatctatgtggcgccccgcacccgtatcctcaccaataaggaccgcgtggttcgtcccgagcagctgcgcgtggcccgccggctcatccgggactacaacacccggggccactccctgcgggagacggtcgagcgtgccgagagcgtcaacgccggcgaggtcaactatatccggccctttaagagcaacgccgccattcacatcgactccttccacgactatgagccctgtatcctggccaagtgcctggccaacatccccaatttccggcaggaactgacgccggagtatatgcaggagcacgacctcaccgacctggtagaggtggtggagagcgtcccgcctttgcacacgccttatgtgccgctgaattccatcgtccgcgagttcgtgggcggcagcagctatgaatattgagcaataagggaggtatcctaactatgagcagaatcattaccatcagccgtgagttcggttccggcggccgtgagctgggcaagcgtctggccaaggccctgggcattccgtgctacgaccacgagatcatcgagatgatcgccaaggaaaacggcttcaacgaggactatgtggccaacgtgggcgaaaagagcatcgaagccgcctatccgctgaccatcgggcaccgctttggtatgcagcccttccagatcatggagcagcccatccgcgtggcagtggcccagcgccagatcatcgagaacttcgctaagcaaggcgactgcgtcatcgtgggccgggccgccgatgttatcctcaaggactacgacccgctgaacatctttgtctatgcggataaggactccaagatcgagcgctgccagcgccgtgccccgcagggtgagcatctgacgccccgggagatcgagtctcgtatgaagcagatcgaccgcaaccgtgcccagcaccaccagatgtacagcgacagcaagtggggcgacaagggctcctacgacctgtgtatcaacaccaccaagcgctttgtcaaggatatcgttccgtccatcgccaagttctgcgaggactggttcaattcccacggttaatacataaaagacccgcgctgcgggccttttaccgcagagaggaaggaggctgttctgtgaaagtccgtctcaatgacgatcccgagatcgtgaaaaccatccgcgagggcctgaaacgcaccggcggctactgtccctgccgtctggcccgcaccgaggagaacaggtgtatgtgcaaggagttcaaggaccagatcgccgacccgaacttcgagggctactgccactgccgtttgtactacaaggagaaataaaaaaccgggccgatggcccggttttttatttcttgataagctccttcaccagtccggccacggtcagcaccacgccgccgataagcatgaagtccgccaggttccacaccagcgcccgttttttggcctttcggtgggggaattgcagatagtccgtcacgctgccccgccgcagccggtcccattggttgctgatgccgcccagcagcaccgacagaatgcccagctgtgccgcgaaggcccgcttgcccagctccggcagcagacacgctgccgccgccagccatacgcccagcggcagccagcgcagcagcttctcgtgcttctgtcccagccccagaaagaacccccggttctccagatgggtcaggcgcacataccgacgctcccatttcagcttccccgtccgggacagatatttcaatatccggtcggcggcaaacagcgccgccgcaataccgatggctatgtacatccgttacctccgtccccgccgcacggtaaagccgaacaccaggccgcacaggccgcctacgatgtgggcgatctgggagacgttgtcctgcttgaacagtccgtccatgatctcgccgcccaggtagaagatgaccaccaggatcagcgtcacggggatctcgcccttccgcgccgccgtaaaggaggacagcacgatcatcatgaacactacgccgctggcacccagcagcgccgtgtggggaaagaagataaaattcaccaggccggtgaccagcgccgtcagcgcgatcatccacaccatggtgccgctgccgtatttctcctccagaccggggcccaccagcagcaggagcagcatattgcccatgtagtggtcatagccggagtgccccagcacatggccgaaaaagcgtacgtatgtcagagggtcggccagagaggaccggtacacggagaaatactgcgtcgtggcggcaccgttggtccagttgcccagcagcagggcgatcaggctcagcagggcaaaggataatatcaccggcgcgttgaagcgaataatgatctttttcaagcaggatacctcttttcaaatacgtttgaaaagagtatactatacattcagaaaaaagtaaaccaaggagggcctgtgccgtgaaaaaatgggtgaagatcattctctgtgttctgctggcgttgttgctgctggcgggcggttatgtggcctatgtgtttatcgactatcaccgtatcggcgaccagatgctgacgccggtgcagtccaccgatgccgcccggtccgtcgatacgaatacggcctatacggtcgtttcctggaacatcggtttcggcgcttacgaggacgactacggctttttcatggacggcggcacggaatcccgcgcctggtcaaaagagcgcctgacggccaacatggacgctatcgccgggtacctgaagcagcagaacgccgacttctgcctgctgcaggaggtggatatcggctccacccgtacctaccatgtggacgaacgcgagccgctgtatgccgccctcttcaacaagagcagcgttttctgccagaattacgactcgccctatcttctgtatcccctgaccgctccccacggagcctcccggtccggcctgctgaccttctctccggcgaatatcaccgcagccgaccgcgtggagctgccggtggagtccggctttatgaagcttctggacctggaccgctgctactctgtcagccgtgtccccgtctccggcggcggtgagctggtgctctacgacctgcacctctctgcctacaccagtgacggtaccatcgccacggagcagctggcgctgttgctggcggatatgcaggcggagtacgaaaagggcagctggtgcgtggccggcggcgacttcaacaaggacctgctgggggactcctccgcctatttcggcgcggcggagcaggaatattcctgggcgcagcccataccggagggcgtgttcgacagttatgacgtgcagatggtggcgccactggacgagaacgatccggtgccatcctgccgcaacgccgacggtccataccacgacggccagtatgtcctcaccgtggatggcttcctggtcacccccaatgttgccgtggacagtgccgctgttttggatacaggctttgcctactccgatcacaacccggtacagatgacgtttaccctgcaaaagtaagcaaaagcaccccgtcacggggtgctttttttcaccgtaaagcaggaaggcgcgcgtctattcataaaaatttcgaaaagggggttgcaaagatgtccgttatgtggtaacatacgtccatcaattagatacagcccgatgaaccgcccggaatggaaagaccggacggggagggaactctggagaatcccattcagttgggtgccgaaggtgcaaggcgcgcgagcgccgaatctctcaggcaaaaggacggagcagacgagtttttcgcttgaccagacttctccagagttgccgttttccggcagctctattttttatgcaaggagagaaattgtatgttagaaagtgtattgttccccatcgtatccaagatcaacgagtacctcagcaactatatcctcatcttcctgctggtgggtgtgggcctgtggtactctatcaagacccgctttgtccaggtccgctgcttcggcgagggcatgaaaaagtttttcggtgagatgaacctccgcggcggcgcccagaaaagcggcatgacctccttccaggcgctggccaccgccatcgccgcccaggtgggcaccggcaatatcgtgggtgcctccggcgccatcctcaccggcggccctggcgccatcttctggatgtggatcatcgccttcttcggcatggccaccatctatgccgaggctaccctggcccagaagacccgtatcgttgagcctgacggcaatatcaagggcggcccggtctattacatcaccaccgcgttcaagggcggattcggcaaattcctggcgggattcttcgctgtctccatcatcctagcccttggcttcatgggctgcatggtccagtccaactccatcggctccaccatgcagacggccttcggcatcccctcctggatcgtgggtatcgtcctggtcatcatctgcgccatcatcttcctgggcggtgtgcagcgtcttgccgccgtcaccgagaagctggtgcctattatggcggcgatcttcctgctgggcggtctggtgatcctctgcgcccgcatcaagtacgtcccttccaccttcggcatgatcttcaagtatgccttccagccccaggccatcatcggcggcggtatcggctacgccctcaagaccgcgatctcccagggcgccaagcgcggcctcttctccaatgaggccggtatgggctctacgccccacgcccacgcccaagccaatgtggcccacgcccacgatcagggtgtcgtggccatgatcggtgtgttcatcgacaccttcatcgtcctgaccctgaatgccctggtcattatctgcaccctgtacaccgctgacggccctctggccaacggctacttcggcgacatcaccgccaccctgggcaagaccaacctggcccagacggctttcggctccgtattcggcgccagcctgggcgccaagttcgtggccatctgcctgctgttctttgccttctctaccatcctcagctggaacctgttcggtaagatcaacgccaactaccttttcggccgcaagaacagcaagctctgcaacgtgatctacaccgttatcgccttggtattcatcttcctgggcactgtctccggcagtgacttcgtctgggaagtcaccgatatgtttaacaacttcatcgtcctgcccaacgttattgctctcttcgccctcaccggcatggtcatggccagcctcaacgaggtcaacaagggcaagcagctgaaggtctgaataagcaggggagaggcgtaagcctctccccgtaattctcccttttgcaaaccgcgaaaaaaacaaaaattaggggttgacattttcgaaaatccctgctatattatacaagtcggcagcgccgaccacccgatgtgggggtatagctcagctgggagagcaagtcaccggcaaagcaacccgcaatctcatcctcgcatctcaaaagtaaatatcttggaaacccggtaaaatcaagggtttcggctccatgggggtatagctcagctgggagagcgcttgaatggcattcaagaggtcagcggttcgatcccgcttatctccaccacaaaaaggaaaccacgacatccgtcgtggttttctttttgcctctatccggaaacccgtctcaatttgagacgggtttcggcagcttattcactttcctctgtttcctccgggagagcctctgtaccctccggcagttccgctgcgcgctcctcctcggtaatggtggggataaacgccttcgccagcttgcccttgccgcgctgcttgatatagaagtaccctatggtactgaacaccaccgcgccgatgaagttcacgaacagatcccccatggtgtcgtacagcccgatgtccaggtatccgccgagccccagatcctgcccgtttatcgtcaccgaggtgatgccgtcgatggtcacggggatgttgctgttggtgggatccagcatcaccgaggtgatggcgttcaccaccgtgtccttctgcatatccatcatgaacagcctgtccatgccgaactcgaagaactcccacagtacgcccacggtcatggagaagcagaacgccgccacagccacatagataggggacagctgaaacttgatcttgctgttgcggttgagaatgtcgatgagcgcgaaccccgtggcggcgcacagaaatcccgtggtggtgtgcagcatggagtcccagtgcggataggtgatgaagtagcacttcagctcgcccagtatctccgatgcgaaaataaacagcagtatgatgatctccagcgtggacggcagctcaatgccgaagttctgctggataaaaaacggcaggacaaacagtcccagtaccagcaggcagataaacgcgctctcatattcgccgcggatgatggaggacaccagcgtagccagtacgatcagccgcagtacggtgtatacggcgaacacggtgggctgccgcctgatgacggccttcagctgcgggcccaggtgccgcggggcctttttcttacgttccatagtgtatccctttctgcgtgtcatttccattttccggtattataccgcaaaatacgaagaaatacaataaaaatgacagcgcggccgggccgagccgaccttcgtcaagcgtctcgtgcgcccagtaggatagaaacagcgccccgccatctggcggggcgctactgtatgcgtttgttactttgtgccgaaaatacggtcgccggcatcgcccagaccgggcacgatgtagccgtgctcattcaggtgatcgtccagcgcaccggcgtagatgtccacatccgggtacagcttctggatgtgctcaatgccctccggggccgccaccagcaccatcagcttgatgtgcttgcagccgcgcttcttcatctcgccgatggcctccgcggcgctgccgccggtggccagcatggggtccacgatcagcacatcgcgctcggccacgtccttgggcatcttgcagaagtaggggtgcggctccagcgtctcctcgtcgcggtacataccgatgtgccccacacgggcggagggcaccatccgcagcacaccgtccaccagacccaggcccgcacggaggataggcaccaccacgaacttacggcccgccagcgtgggcgcgtccatcccgcagatgggggtctcgatgtgcttggtggtcaggggcaggtcacgggtggcctcataggtgatgagcataccgatctcggataccagctcccggaaatccttgacgctggtgttcttgtcccgcatgatggtcagcttgtgcgccaccaggggatggttcatgatgtggaccttctcgctgtacatgatgttatcctccgtgtatatgaaattttaagggtatacgttttattccgccgtcagggacagccccttggccagccgttcgcgctccgcctggctcagccgcagatacaccggctgcaattcctgcgcggaacacgtcagcccctgcgcggcaagatgctccgccgccagcgccacgcccgcggcgctctgctgccggtgcaggggagaggccagccggcacccgatccccgctttctgcaaaaagtcgtacagcagcaccgcgccgtcgcccacgatgagctttggctccggcatggcggccaattcctccgccaccagctccatagccacggccctgtccgcgcagagccttgtaacgcagccgttttctgtccggaacagtgcgttgtatatctgctgccgccgtgcgtccatagcgcccacgacgacgccctcgaagtctgtgacgccataggccattgcctccagcgtggatacgccgcagcagggcagcgccttggcccacgccagccccttggccgccgacacgccgatgcgtatcccggtaaagctccccggaccctgtgccacggcgatgatgtctatatcgtccatcgtcagccccgcggtcttcagcatcccgtccagcagcggcatcagcgtcacgctgtgggtcagcccccggtcctgatacgcctgggccagcagtgtgccgttttccgtcacggccacggatacactcttggcggaggtctccaatgccagtattctcactgtcactcgcctcccgtgatggtgatgatgcggtcactctcgtctgtaccccgggcgatgtccacccacagggtgtcagccggcatagcgtcgtccacgcgctcggaccactccacggcgcacacgccgcctcgtgtcagatagtcctcccagccgatgtcgaacagctcgtcagagctgcccagccggtacatatcaaagtgaaacagcgacgttgcgccgtcgtattcgttgacaatggtaaacgtggggctggtgacccgtccggcgcagcccagacctcgggccagcccacgggtaaaggcggtcttgcccatgcccagtccgccgcggtaggccaccactgtaccggggcgcagccgcctgcccagcatttcgccgatatgctctgtctcctccggactgtgggacaaatattccatcggcgcggcctcctttacctcaaatcgacttattatagcacaccgccgccgaaaaggaaagagcgaaaccacccaagtcgaataaaatgttccgccgcggggcggtcatgttggcacagcaagagtgccgcgcacaaaaagaagaggcacacgtttgtgtacctcttctttttgtgaatgggctataaaaagatgttctttcaaatttacgttatggttttgatctctcacattcttattttccttatcggatcagctactcctttatattggttagtactattccaagttgcgttgctaaagtttcaaggtaatcgatatggcagcgattcgcacaataagtaacaacatatccgtctttgtctgctatgattgtttcggtttttcctgtttttgtgttacggtagaccattctctcacccttatgcaaataagtctctttgccgttttcaagatccactttatatttgctaagtacattttggtagtatttgttaaacaactcgcttgccttttcaatatcaccgcttctaccataaattattgcttcttcaagagtgattaagtgatttccgagttgatcaaaggacggatagtttgctcgatacagcaagatagatttgcggctatttagaacatcaaaaacagggattacatattttttaattcgctcaataatgtctgccgctatcatttttggattttttcgcaagtcataaaatgtatcttcgccatctattaaagaaccaaggcgagttcgtatattacactcgtattcgtgataatactttttcatcggttctgaaattttaaatttcttttctgcacattcaggaacacgaatacctatattgatccacagtttttcacgaatgcctttctgcgggcacccattctggaaatgaattacttgcgaaatatcttcctcaacaaatcgatgtatcgttctgccgaatttgtgaaagcctaaaggttttagatattcgtatacgacctcttgaattgtatctacgcactctgttgaggatatcttttttctccttaagggatgtaacattaaatcactgcctttcagcatattataacacgaaaccaaaggtcgaaaagctttggggtacatccaccgtcatcggtctaagattataaataaaaacaccattgaacttgaacttaagggttcagatatcaatggtgtctttatatgcaaaggacggttaaaatcgatatttttgtttttggtgcagaaggtgccgcagcttataaaacagggccggtctgctcaatgccagcttcctgtgctggggcaatattcaactcaggcagatcgttcagatagcgttccacattccggtaatgcactccattttccaatgcgacatcctcgccgcggtacagaacatatcgccctcggatcgggccaaaccgctgttcggtcttatcacatttttcctggtcaagcagatgccggtattgtgccgggacctgtttgccactgtgcttgatctcgaaaatctcgcagcagttttccttctcgtcatagatcaccatgtcaaactcgccaaccgcaaactgcagcttgaacacccggtgttctctgtcagccgacttcatggtttccagcaggacaatatcctccagcatccgtccccgtacttcttcgaggatcctgcccgcagcctgggtcttctccaattcgctgagagctgaaaaggtctcgtccttcatcagcgagtggacaagagcctgtgcctgacagtatcgcatccccggctgggtaaacaggatgtgttccacaggttttgctcctgggtcagcggtttcaatgggacagtttacgatcagttccaatgcggagagatactctttgatctcccggatatgggtatctgtgataccgatggactgttcctctttgttgcggatgtccagcagctccatcaggcgctgggtgaccgcttccgtatcgatatgatccagaatttcggtacgcttttcggggtcacgctctttccgaagattcgaggcggtcagccgtagatcgtgagattggaagtcatcggtcagaaccgagagcaggaaccggtggttcatgtcctcgataatccggttgatggcgctggtcagctcaccggcctcatacagagagtacaggtggcggaaatgtccgcctgcctcatagcaggccagggaatgctgaatgtttttgcagatcgctgtatcgatgtatcgccgtgtggactcatcatcccggaaggaggcgtcctgggcgttgacatcttcatcatcaaaagcaagctcaccggcccgcagcgtcccgccatagcggatatattcatcaatgctgtcgatccccagcaggcggctgtattcccggtatgggatgaaggtggtgtggatgggctttgcccggtcgtagagctcctgatccatcgccagccaaaaaccgagggagtccgtaccggagaggatgatcttcattcccatcgccgcaaacacatcggagaagagagccgcagaatcgatgaaatcccgcatcagagtgacctcatcaatgaatacatagcggaagcccgcatcgaacagttttttcagatcccggttcatcatggccatggtatcgcttctgcgggctttgatataggccgtgcggctgagatcctctttgctcattcgggcgatggcctgccggagcatggtagtctttccggtcctgcgcaggccaaaaaccaggcagaccctgtcgctttcattgctgtagagataatcctccaattgcccgaagcagtcacggaggccccagccctttacgccctgcgacatggcggccaatcctttaccaacaattacactggtttcaaagtccaactttggctggcgcactttgggcatcttggcttgcagctctttcagctgtgcctgcaatactttgcgctgctctatttgctcccgcagcggctccagttcgccatcccgcagatattggctgtgcttcttcccattttctgtccactgatgatagtagcgcgtctttccgttgatcgtcttcttggaaatatagccgatgggaagggcggcgatctgccgctccagttcctgaatcttttctttcataccgcacctccattctgctaaatttattataccccattcctcttatatattcaaggggttataaggggttatattgttgtaagcagtgccgcacagagcaatttctgtgcggcactgttatgattttctcgtttactcaaatttctaatccggaaatctgctcccactggaggatatatctgtcattgatgatccggttgtcgtggtaatgcccgaagaaccagtatgtaaactggcaccgctgattgaccgtttccagaaaatcggtgagctggtcacttccataggaggggtcgattttccgcacgacactgctgggaccgcagtgggacaggatgcagtctaccttccagtttacctgctccagatttttcagtgcctctacatattcacgggcatttggcatttcttccgcccaccaggagcgtcctttgacccggaacattcctcgcattcggcgcagcagccaatacttttgttcgaagtcgggggcctccggatcaaggacgccatcctgaatgtcgtgggaagaggctcctcccatcgtgaaccaggtaagaccaccgaaggtgaagatctggcccctcatcaggtggaggatattttccctcacctcatgtactctgccgccgtgccattctttttccggcagggcgttcagcaggtcgaagttctcatggtttccgtccacgaacaaggtggtgaagggtttctcagccagccagtccagccaatgctggtctttctggccgccgtcccacagccctccaaaatcaccacagatgatcatgtagtcatttcggcccatctgcgtttgctgggggaagtatttgcttccgaaccgctggaagccgccgtgggtgtcaccagtgatataaatcatgcggatctcctcctttgtatggtttgggtgatctctgttccatccttaaagcagatgagcaggctatccttgtccagcaccttgatgttgctgaccagttgtctgaccgtgagttcatcgaaatccgtgagggcgccgctggcctgttccaatgccatatcaagttctgccagcctgctgtcgaaggccgccgcgcctcgatgctccttttccagctcagctttttgggccatgagcttggttttggccatgtagacctgttgaagttcttcatcatagtcggtacagtcagcgccggcactgacgatcagttggaacagctccagctggcgttcctgcaggttccggatctgatgttccacggcaggtaggctcagcgtctgttcttctccggccaggactgccgcaataccggcttttactgcatccttggctgcctgcatccggaacagctcgttcatggcggagatgacggcgtcgtggatgtcgccctcatccagagtaggagattgcttgcagatcttcctgccatgttccagccggttctgacaccgccagacgacccgtttggctcctttctgcgtccagatcacccggcggtaagggctgccgcactccccgcagaccagcagttcgctgagcacatactttccgcagtatttcccaagctgcgtcttcgccttggaggatgttttcttgaggctggaccggcgggcaatctcctcctgtaccttttgaaaggtttcccggtcaatgatggccgggtgacaatcatggacatagtatttgggcagctcgccgttgttcacccgcttttctctggtgaacagatccgcaatgtaggtcttttggaggagggcatcaccaatgtatttttcattgcagagcatcttctggaccacactatcatgccatactgttttccctgtggctgttttgatcccatccgccatcagatcggttgtgatctgccggacactgtgtcccagcaggaaccgggagaagatgcgccggacaatggccgcctgctccggatcgatctccggctggccatccgcaccccagcggtagccgaggaagtttttacagtggtaatagacctttccgtccttgaagttcttccggtggccccaccttacattgccgctgagggattcgctttccgcctgggcctggctcatcatgaaggtgagtatcatctcgttgtccatgaatagggtgttcacattctctttctcgaagtagacgcccacgccatgtcgtttcaggcgacggacatagttcaggccatccagcgtgtttcggcagaaccgggacaccgatttggtgatgaccaggtcgattttgccgcgctcacaatcacggatcatctggagaaaagcctttcgctttttagccgaggtaccagtgatgccctcatccgcataaagtcggaccagcgtccaatctggattggcgttgattttttccgtgtagtattcgatttgggcctcgtaactggagagctgctcctttttgtctgtggatacccggcagtaaggcgcgatccgcaggtgcttgtttcgaatatcccgttctgtcatctgagggtcagccgggatcatggtgaccagtttgggggtggaggcagtttgctgtatgttcataaggcacactccttttgatctttttggtgtagactgatctctccgccttttccaatgcgtacctgggctactgccgactcaaaaacttcccacagggtttcttcgctctctggctccagctccagcttctgccgcagcagttccagcttgtgtgtcggtgttggatcgttcagtccggcataccgctcggcagcggcggccatgatcaatgttttcatatattccggattgatgtcggcccggttaaagcagagggccagttcattttcgatgcgcaaggcatctgttgaaacaggggcggctttgggaagctggatatgctcaggagaatgagccagcactttgagtttctgcatcactcgttccaaaatgatgctgtcatcaagatacacacttccgccgcactctggatttttacatcgccagcgtgggcggccatgggatttggtatcccgtgtcatcttttctccgcagagagcgcagactgctttgttccgtatggggatgatctcgcttgggcatggagcgtaggtattctgttctctccgccgcaggcgaacagcgagaaattcctcatctgtcaccagtcggggatagccgtccatcccgagataccgctcgttctccaaaatccgcttgaccatatgtttgttccactgggcagtatgttgatgatagcgcacaccttgccgggccatctcgtcagcgatctgactgtaggagctgcccagcaggtagtgggagaagatagaccttacaaactttgcttcctccggttggcagttgatcctgccgttctgaacctgatagccgaaaggtatttttctttgccaagccatttatcgcaccatcctctctatgttttctgacagttccatcccattcagcaggcggaatttcagccgttccgggctgataatgatgatccgatcgagcagctctccaaagaggtccgagggaacctcatccagccattccggaccatcctccagatactccatcattcgctctgtgtcatggatctgccggtcttcaccggctgcctccagaagacggcggcgcagcttcctgagttcccgcagtttatggtcgatctcatccatctgagataaatagagagcagaatccacataccctttcgacttcagccgaacaaggacgagattctgctctgagatacgggctatttcgttgtcaatatcgctgatcttgcggttggagcggagttcccgttcccgcagttcctgcagttggctaagggcaggccgcaggacggtttcctgaccaaacttcagcttgtgatagagccgcaggacagccgccgtaatttccggttcggggatctgcgggatggggcagtttgctctgtccccatcatggcggcggcagacccagtaagtctttcctcctgtgatctttttgcggcagagagacccgcattccccgcagtagatgtgtttatcatagaggctgcccttttttgtacagtgtgccctctggaactgctccttgcgggaggacatcagttcctgtactctctggaaatccgcacagcttacgatggccgggtgactgtgctctacaaagtagcggggcttctggccaaggtttcgaacctgccggaatggaatcgtatctgtggcgcagcttttttgccagatcatatctccggtataagtgatattggtcaggatgtaggccaccgtactgggatgccacttctcacgatttcggcctcggtccaccccgatctggttcagttccctggcgatatcatcctttccctggccgctcagataagcggagaagatgcggcggaccacctcagcctcctccggtatgatctccagatcccgccctgccagccggtagccataggggacggaagatgggacaaacaatcccttttccatccgcatacggacactgaagcgcatattactggagtggttggtcgattccatctgggcgaaagctccatagatttgggcaacctgctccgaggtcatcttcccggtatcgatgttctccttctcaaagtggatcgaaatacccagccggagcagttctcgcacgaactgaatgtactcctgtgtgttgcgtgcaaagcgcgagatcgatttgcagaggacccggtcgatctttccctctcggcaatcggccatcatccggttgaaatcatctcgattccttgcttccagcccggagataccctcatcggcatagatgtctaccatctcccagtcctctttaccggcgatgtgcttggagtagaagtctacctgggcgatgtaggagttgacctgatcttcggagtcactgctcactctggcgtaggctgctaccctcagctttgctttttcggggattctggggtcgatcaccgtgacctgcggaactcttgctgtacttatgtttgtttccgtcatatcttttttgacctcctttcagcaacacacactaccacagtccttccgcaatagccattaccaacaccaacgaaaaagaagtggaaagactgggcaatcagctattctcgtatagagcctgttcaggcgaacagcagagtgggacggagcttgcgctccagctcaacgcgggacttctccgcctcatccactgtcagcaggccctttttggtgagctgctccagcagcttcagcgcggaaagaaacacaaggttatcttgaagttctgtcttagtcataaaagcaccctcctgttatggaggggccgcccaccggagccgatgaacggccccgatcgtatgtttcttcttcctggtctatctttaaatggcggtatcctgcgtgcgggtaaaatcagatggtattatagattgggagaagcccaacgctgacttccagcgcatggtcaagcttgcacatttggtcttctccaagagaaccaagcttatccctcaatctgcttttatcgatggtgcgaagctgctccagcaggatgatagagtcgcggtaaagacctgggactggagcatccaggttcacatgagtaggaagtttatgcttacctttccggctggtgatcgcggctgcgatcactgtgggactgtgccggttgcccacattgttctgcagaatgaccacaggacggattccgccctgctcggagccaactaccggccgcaggtctgcatagtagatatcaccccggcggatgtcctctttgcggtatgtttccatcatttgcaccccctgtttttctggcttaataccacaaaaatagggaccgcttctctgataaccagatcccttgcaggattggaatggtaactcatacagcagtcattccggtcagtgaaagggctggcatagagcagaagcgatccccattgcttctgatattaagacttcacattcgtgttgtctttctttggcgctcgtattcgacactacttccccaagcgcaggagactgtgccactggcatcagctccatagggcgaccatctgaaccgcggctggcttcaccgcgtcatgggactctcacccccggcaggatctctgtcggccgccctcattgcttgatccccatttcggtgggggctgtgactggacggaagtatcattgtccctgacggaatcgttgcgatacagcttgccacaggctgttttgtggacggatggacccgcttggcaccttatttggccgtcgttgatagatggtgatcagctgattgacaaaaccgaacaaaaatgtataggtgtcttcgttttcaacccatgccgctcatctacaggtggtcttggcgcatcctccagcgtcgcttgcttttttcaaaagccccgtcaggaaagtattcagacaatcggatatttggttttcaaggaacaagtgagaagcagttccttctcgcttgtataggggaagatgtcggcattttaataaccctccaatttcaattttccaaaagttttttcaattgcttgaggatgcggactttccgcttatggaccgcaggctgagagattccaagctcccctgcgtaatccagttcgctttggccctcaaaaaacaaaccctgcaccaaagcttgatccgcagcagacaacgctgaaatcgcttggtacagggcctctttcttcatttgttcaaggacgatatgttccggagtgttgatggcatcaataaactcccggaaattttcataggcgccatcctgaccgccgatcatcccgctcatctggatctcatggtcaaaaaaactctgatcattgtccttgatattccaccgggttctgcagtaagtacgatagacctcctcggtcaccatgacttcttcatattcccgagtgcaggtgttaaaaacaataagggtaaacttcccgttggattccatgtgcctttcctccaaatttcaagattttgatggcgaatcaaaatcttgaaatcaggggtactcggcaatataagcctcccagcccatgccggccctcccaatgccgggcagaaaaatagccggggacgcatttctgcatccccggctgatccctgccgccatattgcggcaggaatacagcgggccgggacactttacagcgtcccggcccttgtcagctggtcctattcatttttgcgcatacctgccactgtactgagtatagcagaggcaaagtcggaagggagtagggatttcgtcggtttttcatcgggaatcaatcgggataaagtcggggcatctccaattcttcctgaagttccggcacagcataaccaaaaaggcagagggacaataagaagatcgcctcacgcttccggtcatagaatacgcttcgctccatattcaactcatccagcagttccttttctgtgctgttgaaacggtggataaattgtttggtcaggatctcatagtaaagttccccccggtcagggtatcgtttcaagcggagaagggcacggtcgatcacatccaccagcatccggttttccatcacgcagcagacccgttcctcaaactcctgcagatccatatccggggcgaaactctgtagatagataagcccggtatcagcgtcttgagcacccagctcccaggcatactcatgcagttcttccatccgctcactgaggacccacaccacatcccggtagattttcaaaatcagctttacccgatgataggccagttggctgtcaaatccaagggtcgccatctgtcttttgcatttctgcacagtggcgctttctttcctcatgccattctcctccttccttgttcgctaagctgcgaacaaaatgcatacaacaaagcctgcgaacagcggagcggctgcgcccctctctcaggaggaggggccttgccgtaccaaacttatatgagattgcgtgtttccaaccgaatacgcatggcctgcttggagacttggaagatccgagccatttccgcaaccagatgttcatggcttctgcctgcgcgcaaacggtaaaaactcctttttatttgcggcaagggcatgaggagagcagtagccaaggcgtcagcctgccattcgaccagaccatagctttcatccaaagatgtttttccttcataggcagccacatcgcctgtgccagaatacagcttctggtgcaggacccagtgccccagttcgtgggcgcaggtgaaccgcagcctgccgaggagcctgtccacacaaagccgctcctccactaagatcgttccagctttgacggcgatcaagcggtagcgtttttcatcttggtcatacaaaatggcagcgccctcatcgaaaattgtttccccaaggatgctcccgttcttgcgtaggcaatgatattccagagttagatcaaacttggtttctatgatagtttcaatggggactgcctggggaggtccgtccaacaaagcgggatcgtactcttgcaggatcttccgtccaatggtttcaattgcgtccaatcgatactttggtacagacaagaaaatccccccttagttctggcggttctgcaacatttccataaatgctttccattcctcatcggtagcatctacttcttttgccactctcaatgctgcgcggacgatgtcatgttggcggatatagtcaggtagatcggccggaactgtcttcctggaatctgcggctaaatccagcagtatttcatgctcctgcttatccaattccagaaaagaagagatacgctctacaaacgcttcctctggcgccggccggcgcccctgctcaatatcacacaggtacccattggagataccgaggtgtttcgcggtatcccggaggtttaatttggcctctttgcgccgtgtgctgatgaaagatccaaaggtcactggtatccctccttcatagagtttcgctggtttgcgaacatcttgtttatattatagccagtacatctgttcgatacaaggataaaaaaggaaacggaggtcaggtgttaaaatttcataacacctgacctccgttttagagaaaactgcgggcgatccgcttcatttcttccacacactcctggggtgctatgatctgaataccgcccataaatttgaagacccagccgtaaaaggtgctgcttggatcgacttcgatttttgcagcaaagtgttcctcgtcatatggacgagtgggtacagattctccataatggtctatgatggttttcatcagcttgttctcgcagagcagttcaacagaaatcgtgcggtcagcagcaaacatatcaacgatcttgttggtgtagcccgccacatcaaagccttcatcgggggtaaagccggagggaagtatcttgatccccgacaggcggtctactcggaaatgggccatccgctggtgcttgtaagaaaagccaatcaggtaatagtggtcattcttccattccaaagcataagggtccagtttatagaggtaaccgccatgcttgagaactcgttttttctcgggcgtatattcataatactggaactgtacctgccgcttttccaaaatcgccgtttggatggcatcaatgatgtaatagacttgctcattgtccggtttcacccgactggataagctggcgaactgccgaagctgctctgcctgatatgtgccggctaaacggcataatttctgtaccagttcctcggatttctttgcagaaatgatcttcgaggatgctactgcatctgtcagcattttcagttctggatactcaaacaggcggcttcccataaaatattggttttgggtacttttgaccaccacaatatcaatccctgcatcgatcagcgcattggtatctgcgtaaacagtctgccgcactgcctgaattccttttccattcagatgggcaatgatgtcagacactgtggcgggatggttttcatcggtccgctcatagagaaaccggagtaattccagtatccgcatatttgttgaattctgcatacttcacctcctcgattcttaaaatggcctattttgtatggtgtccagccccaaagaccagaagcagggcgacagcacagagaagcaggccaatccaatttcgatccataatcagcttgatcaccgccacaagcagcagtccgcccaccaggagcacaacgccgttcattcagcgtcctcccgaggcatagttccccatgtggatgtccagcacctctctgggcggctggatcagggcgtcctcatactggcacttccactggatctcccggctcatctggccatccgccacgccgtctatggtttcaccatcctcaatgggattatcatgcttcagaatataggacgcaacattataggcgtggtttaccacccagtttgggtccatgtcgtggaagtggtactggaggtcgggcagaaacagggtactcatgcccaccgtgtcgatgagcatatcctcagtgccctcaatgttaaagaagcggacattgaccccaaagcggatgaaccgatccggaccctcaatctgatgggagcgtacatcctctgccagaaacagcttgccgcagttctggaaatagaatgcctcacaggtggggtacagctccgccagagcctccaaaaagtcggcgtccaggttggcacgctccagcgccggaagcgccgcagccagcatatcggtggctaccacctgatatttgcactcccggaagatccgctcccggtcctcctggcagtcccacatctggctcatcaggaaggcatcaaagccattgcccttgaacttgtcgcatttcatcaccatcagctgcaccgggcattttccgtccttgaactctgcaatatgctcctgtgcggaaaagccagccattttcttatcataacagaagcactctgttgatccgatgtgcttctccattacggcagtcattttttctttatccggcatttctaccggctctttgaacagcatctgaatgagataggggccaccggactgggggccttttttgtcgtccagattttgctggaaagctttattgctcatttggtttcctccttcttttctgggaacagtttccaccgaaactccagctctttctggacaaactctttcggcaggccttggggattggcgatgagataccaggcccgaaaggtgcgcttctctgggtctgtctcctgccggtagagatgatagcccgcctcatcctcctgtgtccactgtcctgtctgccgcatggcctgcacaaagggttccaccacctggtccagttcctctttggtgcggcttgaggcccaggcatgatccacatccttggcatgggactggtagaacagcaactttccagtatgggtcttcgccttgcactccggcgttccgcgcaattctgcctgacggcggtactccgccagctgttccactgtcccgtatcgttccaccatctgctcgtccacatggatgcgccagctgtagtcctccgcctcggtgaagggggcgcagaccggctgtaatgcctccacggggtctgcctcgaagcggtcgatgaagtcgaggtagtgggcttggatcaggggcaggaaggtgtccaggagcccggtgtccagccgcaggtcctctgtcagcatccgaaagaatgaaccgcctgttgtgggttcaattctgaaagagtagaggtagtcatctccctgctttatgatacagctgaagcccacctccacatttccatggccgatttcgtagtctatgtagttgtagtggctccggtcgaaccagatctgataggtcagcccgtttttagttttctttttgaagtcgccttttttcagccgcttccagcccttttcctccaggcccaggccgttccacaggtagtccagaagctcctgaaatatatctgccgggcgtttttgttccatggtctccacctccttacaaaactttttctggggttcagcggtcatttgcaaatcaaatatggagcagggaaacagaggcacaaaccatctcattcccgagtcattttctgccgtcacaggtctgacttattttgctccattgcttgggcgatctgtttcatagccatgtcgatatagagatacaccccatcacgatcacagtggaacaggttggagtaacatgtgctttcgttcgggtgaaggggattcggttccactacttcggtggcttccagcagaccagtacccagttcagccgcagcagtaagagcctttttcagaacagcaaactgcccatcactccaatgtttctccagatcttccagtacctttggttcctgctccagatcccggagaatctgcaaaacctgatttggggacaggtacacgccggagcagtagttttccatgatctggttctttgccgggttgggtaaggcagtgggcaccacctgcgcccagggggtgaagtaccgcccatattccagcttttcttccgccaggaaagaaaaagcactgcctctggtgtaatagtaatcccggaaaaaaccttggatcactgcaatatagaaaccatggcttttgtcaaacagctcgttggattctgtttcagacccaacccgcagggtatccagatatttttctgcatagaaatcctctattccatactgtgtggcgagtgccagcaccttttcctcctgtccctgctgtatccaggttaggggagtaaaataccattcctgtatttcgtctggcgagatcgggtgaaaacttacatcgtatcccataaaagtcctccttagtaatcaagcaagataggcacctgatgttcctcggcaaaccgcatggcccgccagaacatggagaaggcgaacttggcaagggactgggtgtcataccgggtgtgttccgggatgtccgccttgctgtactgtccatccggggccagggtcccgtctaccgggtatccctcggtgtctgcccagccaaggatggtgtcctcatcggcctgccatgccagatggttcagcttttccagctccttccgcagaccacccaaagtagcgatcatcgtctgatcatcggtgggcagagggccttggaatagaaagctgtcggtgaggggaagccaccaagtcgcgccccgaagcagggaccacacccgctcctcgtccgatgcaaggcgggcaatcaggggatgctccccgaagtcccagtccttctccacggtgagaggcaccggttcctcgtatgtatgacaggcggccaccagcagcatagcgccaaaggcatcccaatccggcttatcggtgtaatagggccgctcgttgtcctccggccatggagtgtagggcggctggtccggctgggaaatggcggccaggatctgatcccgccagttctccaccgccgcctgaacctcagccggggacagctcctcctcgttgtcggcgggttctccatccggcgtgattttctgaaagccccattcattttcttccgcccactgctgtgtgacggtcttccagttgtgagaatagtaccgggtcaatgttccggcgtagatatcaagtcccatggtgattcctccttttctgcttggtcaaagccgttccagggtacagtcgtgcccggaatggtccgtatccaaaatgatttctgtaatggtgtccatcatctcttttccgagattacggacgcttttttcataggccagccactggatgcggatgggctggccatactcatgccgcccaaaaccgccccggagaatgtcattgaaagcgtccaggttccgaccgatcttccaatctaagccgcaggtgaacacctgctccacctcgtcataaaaaccggccatgttagaaaagcggcggccgtcaatggtgaacacctctctcatgtccatataaacggctcctttaagtcatatttctccatgatcttattttccaaggctttataggcatccatatcctctggctgcgctggaatacccttttgccaataaccgttcccatagtagaaaaacatagcccagtaataaggcaggtcatggctgaatatcgccactcccatggcatcggccactggctctgccagcggtgagcgttccacgatctgggaggcttcctcataggagatccccaccagctccaccagcaggtgcttcaccagttcacagaagctgtactggttgaatatgacctgaccatcctcatctttgaacacaagtccatctctcaccatggtattctgctccgtttcttactcctcgtccccggccttgaagttgtagatggggcggatgacctttaccacatccgccgtggggccaatgttgtccagaatatcctgcatccccttgtaggccatggggcactcgtccagggtggccttgttcaccgaggtggtgtagacctctgccatctgctttttgaattcagacaccgtgaaggattgcttggcgtccgcccggctcatcagccgcccggcgccgtggggagcggagcagttccagtcctcgttgcccttgcccacacagagcaggctcccgtcccgcatattgatggggatgagcaactgctcaccctccttggcggacacagcccccttccgcaggatcatggcgtcggtatcgatatagttgtggatggtggtaaactgctcctccacatggagcttcatgcctttgatgatttcatccatcatggcctgccggttgagcatggcgaagtgctggacgatcttcatatcgtggatatactgctcaaacagttccccggacacataggccagggccttggggatactggtctgtttgaggtttttcagcttcttcagttctttctggatttccttctcccggccctctgccttcatctgggctaccagagtttggagagaggcatcatcggtacggttgagcaccttatagcccgcctcctggtaatagctggccacctctacacccaagtgacggctgccggagtggaccacgatgtagagatttccctcgtcgtccttgtccacctcaatgaagtggttcccgccgcccagggtgccgatgcttttttctgcccggaggagatccacatggtgggcacagcacagttcgctcaggtcgatctcatcaagatagcggtgggccttatcccgtatggagaagccggaggggattttctcataaatcagcttgtccagcttttgaagctccagccgcccctcccggatgcgggtggtctccatgccgcacccgatgtccacacccaccagattgggcaccaccttgtcggtgatggtcatggtggtgccgatggtacagcccgccccggcgtgaatgtcgggcatgagccggatgcggctgcccgccgtaaattcctgattgcacagctcctgaacctgtgcgatggaggcgctgtccaccacatcggtgaagatcttggcctcattgtattttcctttaatttcgatcataatttcctcgcaatattctatggggcatggccccgtcaagtcatctcatacagcagggcagcgtcgccctgcaccagttccagatgggagcgcagcgtttcaagcccgctttgcaccgcctcggtgggcagatcccagtccggggctatttcagcggccagctctgggaggtactgctcctgcagagctgccagcacattagacgccagctctccctccagcaaagcgcagtccagggtgtcctcggtctggggagcaggaaaacggacatccagatccagctcgctctcacaccagtcccagatggccatatagaccgcgccggagcagtcgccattggacagttcctgccgccggccgtctttgagaagataaaaggatgcgatctgtgacatggcaattcctcctgaatgttattctttatctatcagcccttctgcctgcatccggatcacatagaaggctcgcacccagtccagctcctgctccatggattcctccaaagccagcaggcggcgttttcccagtctgcggtccaggagggcgaagatgcggacaagaggattctcgctggtaaggcttttctcgatgctctggttgtcaaagatcccaaacgcctcatagaacaccttttggtcaaaggtgccctgctccagcgcataggcatgagcctggttgatggcctcttttgcggagtcgcaatctttcagcgttgtggacctcaaatgatgaaatttcgtccacacattctcaaaataggtgtagtagttgctccgcagcacttccacaccgtccacacgaatggctgcccggccctcatggtcggcactcttactgtaactggtggcaaaatactggatgtggccccggagtgccgggcacaggtagtcactttccagtttgtttcggattccgctccaggttgacatggcgaccgcctcctttctgttgccactgcggataaggtagattcccaataaattgaaatttgaaggttacatataatcctcgatatatgatcgttctataaattcttttactgcaaatagatctgcaaactcctcataccggggaaatccgtccgtattatgtgctgagtaagtcaaatggaacagatagtaaatgtctcttcccgttccgtttctgagaacatataacacatcatcattggattcacacttcgcaaccgcccagatttttttgccgtataagaagtggtcttgtcctatttctttgtttagttcagcaacaaatgccccgtccgcctgtgtgaagggaatcatataccagttaaaatcgttaccatatttatcatagagatcacagaacatttcttctaatgtcattttcattcttctttcgctgatttacagttcagccatcaaccgccgcgctattttctttttataggcgatgttttattgctcattgagatacctcgccaatttcttctccagcagttctgtcatatcattgcagagtcgcttgaccttgtcctgctcatgggcgtagtaccagatggtttcctctccggggcggagcaggagctggtcgccgtccgcttctttccagaactcgcccagcacgcaataccgctctccgtggatggtcaaattaaatgttccagagagttcaacgattacgcctgtgaatacattgatgcctgcggtcagcaggaaaaactcccgcacctgggccgggagcgtgaagtccatcacgctttcttgattcccgatttgctcctccatggtggcgggcttgatctcatcagaggggtccagcacctttgccaacgccttggagaacttggggtatcgaccaaatagttctgggtggctggccttgaattccttttgcttttcccgctgcactcgcttctgctccttgcagaacgcatccagctccgccagataccgctcctggtagagattgctggcctcaaatgctgtgccgctcttttccagaatggcgatggctcccttttggctgccaaacaccgggacccactggaaaccatgccggcagggctttagcttcagaaattcgccccgactcagcagggtttccagttccggctcatgctcgtcccaccagttccgccaactttctggtgtttcccggccttcgaccaggtccaggagctttgctgtcaatgattctttgttcataggtgtccacgctctttctccgccatcacgatactcgtgattccaagacttcgccattatcgttgatataagtgtaatgaataaaatcctcgtccaaaagcaacagatatggactaaaaacttcccatgcatcatgatcgctcatgatgtcagaatatttgccaaatacataaatctcaaataaggcgtctgttcccattaaaaagcacaagtaggcatttccatggggatatgggcaaacttcttggatcgccagctgccccggttgctcaaaattgagttttgagataaaggtttcaattttgagtgcttccgcttcatccgcatatcggtatttttgagaaaaatgttcgatactttttgtgagacggtccttgtattgctgtatctctgctcttttctgttttatcttgagctgcgctcttttctgagccaaaagttctttcctctcatgctccatagttcatttctccgtttcagagggcgcaggaatagatgctcatggccccgtaatcggtgtgcaggacaagtccgctttgagtaaaggcaaaattcacctgacgcaccacaaagggatcatcaatggtggccagcagttggccgctgccggtatcccacagctctatgggggagctgccacgatcctgctgaacggccatcaggctgccccttgtcctcaccgcgcaggtgtctgaaaaactcagtccctgccggaccgaaaacgggaaaggattgtccatctcctctccggtctgggccagatagaacttgccgcccaccgagaagcactggtcatccggagagaagaagggatgccagcccgcattggggatcactactttttgggcggacttcaaatcgaccagcacatactcgtcctcggtgacgcggtaggccgctttgctctgccggggagagagcatcccgaagcagtaataggcaaaattcggattcttagacttcttgcatttcacgccttcccgccacatctccgtgttgctgccaaagtcacagacgacgatctcctcgcctgtgtaccagagggccaagtcgccgctggcatccagcatggccttcatgctgtttttcttgttggcaaagggcgtgatttcatgggtgcggagtgagaactgctggagaagatagctgttgttcagaagaagggtgtcattggggcagaggacctgctcataggtcattctctttgcgcccagggaaactgtttcgaggatctccccgctgccatcgaagtgatagagggtttcgtcctcaaaatctccggccactctcgtcaggaagaagtcgtcccgtgtgagggcggcagccaagggcataaagccgttgctgtccttgccgacaaaccgatggcaccgcgcctgcccaacagcggcatccggattctgatagacaaatcctttccgcatttggctcatcatggcgctggcagtcttgctcttgacctggaaggcggagtcgcacaggatctccttgaccttcccaccattcaaacaagttcggacggtatgtccgtcaatttcaatccgccactgcttatttgtggcggggttgaggaaggttttttcaatcatggttttggccgttcctcctttcggatcaggatgctttttccctcggagttgatgctatacaggtcatccagatggatgtggaatccatccccgcgaagagtttctgccatacccaaagcggctttcgccaatagaagcagccccgcccggtttcccgttagctccaattcatttccatcagcatgagtggtaaaggagaggtgggcttccggttccactggaaggatgggcagttgttcatcattcagttgaatggtcagtgttttgggtttcatcgattgccagggcacctcccacatcaatcccaccagaagtaccagacggtggactgccgcaggacatctgccaaggagccaatgcttccatcctcattctgatccagatctgggcagaaaccatattgctccacagccacctccatagctctttccttggagatcggagttggaagttcaaactccaattcatcgtggctcatggcggcagggatggcaccatgttgctcgaaccagtatttcgccactgccatcaggtccggtgtgtcgggacactcattccaatttccaaagggcaggtaggcgaagatctcccaggggttctttaccggaattttagccagaatgagcggatatgtcattccggtatcatcgttccaatagtttgcgaagcggtcgttgggttctccgccctccatctcgcccaggacttcctcctcccagtccagatcatcgtcctcggcttcttccttgcgctggccggtcaattcctccaaaatcgcctttccgtccttaacaggagcggagagcatcttcttccggtactcctctaccgttttgaggtcaaattcatagcagtccgcatcatgctccgggtcggcgttcattaccagacattccaacagcgtttcatcatccgcctggataagtacgggaacaaagccctcccgtacccccagccgctgggcgtagctgtatgccgacatgatggggtcatcatctgccatggatgggaaataggtacactcgcagtccagatactccatgatggcatgagccacttcggaaggctccagcgtgtcctcgtcgaagtcctgtccctgccagttttcaaagcgttcctcaatcacttgagccattgtctgatagtatttctcatcaaatgggatgaataagtatgcctcctgttgaaattcattggagtggtatcgggacggaccaaaatatttcagggcatagtcatcaatgtcggcaggatagtaggggctgttgccctctccgtagtaatagcctgcaaaggcacggccttgctgattgaacagcacagagaacagacagccgtccagctcatcccggataaactccctcagatccacattggcaggatcagctttgacctgtttggtcacttcgctgtattctttcaagaagtcctcgcccatcaggtcgtgctccatacaccagcgcaggtagatggccatgtggttataagcattgatggggtcaataggcagttccttctcctcaatgctctcaaggtgataggaagcgtcgtccatctcaccgtcaaaattatcattggaaagggtgccacgggtgatcgcattctggcgagtggggtttacaacaaaactgatccccctcatcttgttcagcagagcgtctacatcatgttccagtttatagtccaactcgtcctcataaagcggaatgacctgatagaagttgacctcctcgccgcccggcagggtgcagacctcgccgccctcctctgtactttgggggccggtgagaatggcggcacacagcttcgtattttccgcaaagttctccttgttatccatggtatgtccaaagcccagccaagtgtcgctggcaatgggcagacgagctaaaactttcagcagacggataggccagtaccaccgctcatcctgcatagattcctgaaccaacttccagtccgcaggcagcgcgatagccagctccgcccgctccagcttgtattctgccagttcttccggcacattcatccggtgagcacccatacccatggtgaccagggtataatagtcccgctcctcagtgggcggcacgatgcagatgtccacatggatgtccggggagaccaactcgtggaacacattctcgaccttaccgaaatactgctcaatgtgaccctcgacggcctccatctcctcctctgtgtagatttcgggattactgaattcttcctcatcctgtgtgtcatcattgtctgagtggtcgcagctgtcatcctctggatctccctttataggctcgtaaccgatcttcagggtcatctgttcctccggcagggagacgccggggctgcgggtgatggtgtgcttatcgtccgcagaaaaaccgatggtctcgccgtcttgcagtgtcacatcacacgccagcacataggaggcaaggctggccaaaaagtcccgcagttcctccggctcagcgtcggtgttcaacacctccatttcctccttgccaaacacatccatgccgtaggtgtagccgtttaggcccccctcgctccggtacaggccgaaccaaacccagttgaagatgggcagttcgtcctctttgagcatatcggcaaggccctcatagaaacgaggctcaaataccacgccgctggtgtagacaccggtggcatatttctgcttgcagcacactgccatcgccttagtgaacagcttaccccgttccagcagtttttcctcctcgcccaatacagccaccacgatatgggccttgtgcgctttggccacctctacggcctctggccacatatagttgttttcggcgttgatctccgcttcattgtccgggatgtgaccgtggaagagtgtcacgatcagcatcatgccgccgacccgcattaccacagcgtcatcgctgttctcatcatcttcgtcgccctcatccggctcctcatctacgatgccccattcttcccgtagattccggatcaactgctccttgtcccattccgctttggagaggagcacagacccggcaaaggagcccttacggtcagttttctcctcgtcggcgtcatcctcaagattctctgcatcttcatccggatcatagagggattcatgctccagtccgcggacaaattcctcaaagctgtctgccagatgggtaatcttgtagtcgttttcctgatccacatggactaccgcaggctctccctgggggccgcaggcacggtagtccaggaaaatcatatcatgtccggcgctggggcagtcgcagatggccacaccgatggcaggatactcccactcatcgatcataaactggctgcccagctctccgcagagggagcagctcttttctcgcccgatgccgaaaatgccggtgatggccacatgatcctctgcccagcaggtaggctcatcgcaaggatagcaggtattcaccggaatgccgccgttgtgctgcttcatcagccagatgtaggcggcgggcagcttgtagcccagttcctcctccacgctggcaatcagctcatcggaaggcggatcactgacatattctttcagtgcataccaattatcatcccagaagttggtgaggtcgaaaccctcaaagggggtatcaccgggcacgaatttggccttcttcttccgtctgcgctggcgtttccgaatttccgccttacactcctgaatcaccgccggggcattttcgtcctccgggtccagttccgcccaccgctgagcgtagggaatggcctttgcctcctgctcatagagatactgatagccataggccatccgcatattccactccgccttgtcctggccttcctcccggacggactccagcacctcaatggccctcagaagggctttgtctcccttggatttcaaagtaccttcgtcatggtccccgatgatggcgtagttctccagtgcacgggccagggcgtaggcggtgcggtagttccgccagtcctccgggatggcattcagtgcctggatacagcgggtgtactcgtcttcgtcgttccactgctccagctgagcgaagaatgcttcggcgttctgttgggtataaggaatataatccatgcccataagcgtttcatccaactcatcatcctgattctcagtttctgtcccatcatcttgttgctttaggggtacagaaccggcttcacggcggaaggtgtggaagatggcccatgggatgtccgtgccttcaaagaactctttcgccatgttcagcgcctctcggatgtcccaggcgatgaagtccacatagccacagtagaggccggtggccccgccggtgagagtgagcacttccgatccttcatcagtggtaaacacttcttccagcttgtcccggaagtcgaagatcttctgactgtcttcctcctcccgcaaggtgtccagaggatagcagaagaagcccgctactgcgccatcggcgtgaagatcgtccataaaatcattgtcggcattcagatagccgttgatgagcggaacacagcaagtggagcccaacatggtatccaaccgccaatcggcgtccgggtcctgtttgggttccattttgtaaccaaggtagctctccaaataggcttccgggtcggtggagagctccaggccctgctcccgcagtttgtcggccagctgggacaggaggaaggacggctctgccttgggcttttccagcacatcaaagctgtctatgtatctcatgtgggggatctcgcccagcacttggtcggtgagggtagtgagcatccaccaggcccggccttcctcctcccggagcataggcagcagcttttcacagtaggcggagatggcgaagctgttttcaccctgctcctccagccagatctgcacatcctccccggagatgtcccagccatcgtcggtgcgcagtccgatgttttggaggggctgacggcccacaaggatgttccactgctccagcacctccttgggggcgtgtttctggaagtagaccagctcaaacagcttgaccttgtcgccctccggggtgaggatcagctcatacttctcgccattgaagcccatctcgaaggaaatctcgtcaaagaccagattcagggtttcctgcatttgggccacgagttcggcgccgcgggtgtgatccttgtcctcgtccatcatctggcgcagttgggcctcctgctgggcaaagtccttccatgcagattccgtccgctcccggaagcactcccagaactgcggcagagaaatacccttcttgcaccgttcgataaactctttggtgtcatcgtcaccagggcgggcttccaatgccttttcaaaatatcgcagagcccggccctcctgatccagataaaagtaggagtaacccatgcggaagttccagtaatagtcgtcctcgaagtattcctcatggggctttagcagagcgagggcctttttgagcatttctttgcaagttggcttatgtgggtctgccagattgttataggcacgggctaactcgctgtccatctcaggggtacgctcctcggcggggatggcctccagcgcatcaataattttatgttgtttgctctcctcatgccacttctggcactgcttcaaaatatccatatccgggtcctcctcgtcctcgtccggtttccagtttttgatctgctggaacacgccgttctcatcccgctcaaaggcgcagggggcgggggtgttcagcagaggaatgatgtcgggatcgtcgttgcagatcgtattcagtttgtagatcccggcgttgttgggatcgtccatgtacgcctcactctcgtcaccagcggtgaagcgccagccactgtcccagccgccgtccggcttctcccggtaacagtagccgaccttgcagccctccaccgtgatacggttggtggcgatacagccatcggcaccctcccagtcagggagcagatgttttacatcttccgcctttacatggtagttccgattacggccggaggctttgtacagctctttccgcagcatctccacctgataagccatatctgtgatctcatcctcgcccatcatctcgctgatgtcgtattccagcgggttctgggcaaaatccgccagggacttgttcattgcgtcatgctcctctggcgtagcagtgatgcggatacggcggatgggggtgttgtactcgtccagatcctgaaggtttacactgccactgacgctgcactccagcaggatggcggccaggtcggtgaccacatcaatggcgaagtggaagtccatttccacgccatcggaatgtgtaaactccaggtactccacggtttggcgaaagtcccagttctgcttgtccagaccgatcttggcgaaaatctcgctgagggggatctcctcctttttctgatcctctaaaaatgccacaaggttcagactgtcatcggaaccgccaataaagttgccccaatattttttgatatacatctgtcacgcctcctgttctgaatccagtcgatcaatgagctgattcaagtgttccaaccacgcaggagcgatctcaccgctgtcctcgttcttccaaagatccacaatctcacggatgccgtcctcgtccggcacctcatttttgatgtcggtgagctgccgcagcaggaaagcaagggcttctttggatgctgtgaaaccggtgactttatcccatatagcttcttcatgatcgtagtccagtttgctgttatccttccattggaaatacagctccgccagagccatcgcagtattgtcaaagaggaagtcgatttgtgagaagtcagatcccagcatgacttcctctttcatcagttcgatcatctcgcccagatccattaccggatgctccggtacatattcatttttgaggatgtccagtacatccagcccttcgtcacgctctaatgcttttatgccccatgctcccatgtcggcacctctctttctttattttgtatcaagcttctattgtcaatcatagttctccagccgaatgataggccgataaaagtcataatctccgtttagttcattgtcctcctgcacttccggcttacagtggggcgaacagggtaggaaaccgagaaatgggcccagcccaccgcagatattgcatccgccatcgccgccgcaggtggtaagcctatcagcctgcaccacttcccgcatatagggatcgtaggcgatggacaggccgaagaagttgggttcctccatgtcataaggccggttctcatcctcatccatatcctcaaaccagcgcagacgcatggagtagtctaacccatctccccatgggaacagggtccgacaccctccgccgcacaggtaggcccactcgtccgccgtgggcagggagaagcccctgttttccagcatggcaagaagcgcatcgtagtctgtgcggttatagatacagatctgaaagcccttttccgtccgctcaatgcgggccgactgatgcaaggtaagactgctgctgtcactccaggcaaaatcacggaattccttcagccagtcagggtgggcagtcagcctgggatcgtccattttgactggctcccagttaatttcctccagttcccggcccaccagcatggggccaatggccgcctgccgaacgggagccatgctttcccgaatcatctcctccgggttctgcggttccatttcccattcccggaacagatactccaattcctcccggctctcctgattcagtccctcggcaaactgctcccagcccagggtgacggtatcgccggggacaaagacgaactcccgaccatctttcttgaagatgccggtggtgcaactctggccccagcggtcaaaagtatgtagaccgagaaaggtcatatcataacgagcagccaggctttccatcagcgcctgcttctcggtggtttccatttgattgaattggggacgggacagtttttcgttcatggcaagtcctccttcgattcgttttgcgtgttccagcagatagcgccggccatcctgcttggcctgctccaagtattgaggaagcaggccggaatggatggcgtccagcgagaccagaaccgcgatccgctggtattcctgtaattcgagggaataacagttccgctcccagaacagcggagcaaactgttccacacagtcaggacgcagagcgggcatcgccaaaagtgcccgtcggctcacatattcattggggtcctttgcgaaatccagaattatatccctgacttcctgactacatgagcattctggcagataggcggcaaactgccacttggcctcactctcattggaggctgcggccctgcggcagaggcactcgaaccattggggatgggaagtggtctcctgtataaacccctccgcttcgttgtccctggcgatcagatagaccatctcatccagtaggacgctgtctgccgtttctgcatccatttgggtcaacacatggcaaaaggcactataagtgtcgttccaatatggataatcaacttcccactcaccgccaagttcctcgctggttttgccgggataagtggcttcctgccattgatggaactttattgcctgctccagtaggcgttcacgaatgccctttgccatgtgctcacctcacaattttccgaaatggtccagatataaatcccgcacagaatacgggcctacaaggttcgtttcctgtcggccatcccaggaatacacatgaattttgccctcgtccccaatgtactgttgttcctcaaaagatgcggggaaggggaaactttctaccatgttccagttgatcttggatttcagctcatcaaactcctcgcgcttgagccttttgaagttaaacaccagtgctgccccaatcccatcgaacagcaagtctgcgtattctctgggggtgatgctctcgctcacattggcggcatcaatattgacatccagaaccttgttgccgcagtttgtccagattttatcgggagagaaccaggtggcgcgttcctcagcgtctgcaaagtcctcacggggataccatccgtttgcgctgtccggcttgacgccttcccgaagctgcccgttgtacggggaaagcggataatatcggtgccgcaccggatcaaatcggtcaaacgaagttttcagcagatacctatgcttttcgctgcacatgagcttatggggcttcacaatatgttcttcgatcaaactccaaatgtactcatctacacggatggatacacggggacggctgaatagtgtgattttgttggtgtctgtatccacattgagccagacacgattgatctcaaccattgtcactcctcgctttcaccaagtaccccgccatagagaatgccgttttttccgaggaacagcatctggctgcgaagcaggctgcactgctccacagcgaccttgtttccgtcacaggtgggaatagccttctgttttttcccaaggcgaccaccatgagcggtaaggaagtagaatttgttatgttcctgatacccgccctgaaacagaaaagtatcaccagacggagcaacagaaaaagctccgcttccttcgattggcagttcaaacacaagatcctctttgaaggtcgtccgcaccagccggaattcatcgtaataatagaaccacaggttttcttcttcgtccaggctgatggcatagcagtcatagatggaatacttctcattcttccagagaggagttccctccgatgtccatgcaatcaggccgcaagcacccagaggttcatcccaaccgtaattaccaaatacaccttcgtcaaagtagctggtaatgatggtgccatctttttttaccacacaatcttgaatgccatcccccaggcagaaacgggacagcacagttccgtcccggctgacaatccaggcgttctggtcagggccgttttcccgataggcgcatcttgcccccagcaggaggaagtgatcacctgcgggccgcaaataatggaactggaacttcaagaggccaagaggaaacagcgtcgtttccagcacccgctgttccgcccaatccagctggatttccactgcggtataggtggaaggggtgctgagccagtccttaccctgagtttcggacggctgttccatgagaagatagacttttccatcccttgccgtgaaaaagtctgtcacttctgtgccctccagatggttttcccggcgcagctggtccaggtcaatgatggggaacaacggcagatttttggcttttataggtttgttcatagtgtctcctcctggttcctttcatgctccatcataggtgtggctttcccagatggcctcaaattccgctttctctatgatgcaggcgtggaattcctcgccccagatatgggcgttcaattcctccacggtggggatcggcgtgatctcgatggcaccgtcgtaaaggtcagggatgttgtgggtgcggccatctgcaaaaatgtcgatggagcgatgggccagccgctcattttcggtatccacttcatagaggatgaccggtggttcaccctccggtgcgccctcccaaaagagcttgatgtactcgattttgccaagataagtccgcatcgctttttcatcagcacaggctactcggatcattttggccagcatcatcaaatcgtcgatgtattgggaatacacgcagaacacatcctcgtcagagtcgaagtgaaacatacccacaccgctgttgttttcctcaaactcccgtatcacgccccggaccagccgttcccagtctccgctgctgccggtcagtcccagccggcagaattcttctgtccggaacccgtcactgatcttcagcagaagggagatggcataggggtggtggggaatgagaaagaatggcgcgatctgctccggcttcacccagattttgaagggcgggcgcggatcaggtatccagggcaagatttcccattcgtcctccggccggtttccgtattggcaaaggtctttcatagtgttctcctcattcgatgtcgcttagttcttctttcacatccagtggagcgccgtccagagatgtgatctgtgccagttctgtttccgtcagatttttcaggaaaatgcagtattcgtccgggtggcctcccacaaactccattttgggcatctcgatctgctgtgggtcggtgatccacaggcaaggttctcctgttgcccaaaaccgagtcagagtaagaatttggccgttgtaaattactttctgttccatcctcatttctcctgcatttgcctcagcagcttcacgatccgctcccggttctttgcggttttcataaaggtggggagatggtcggcctgggtcattttcgctcttcccggcggcttttcccgcagtccggcgctgagatagccgatcagataggcaagatgttctcggttgagtgcccatacaggttttccctgaaatgaagtcaaaaaccatagtttcaacccgaaataaggttctcgtccatctctgatttcgccaatatatgaaaacgcctccgctgttttatgaacttctcccgacatggttgttccgcaataggggcaggtcacatggaggacgggaaaatgctgctttgccgtatcttcaatatccactcggtagtacctgccgcagtttttgcactggttatggacatcataacggtagatcgtccgatcctgcgtcatccggtggccgcagctcaggcaccggaaataggcgttgtcatcatccgctgtcaccacacctgcgccatggcacttggggcatttcacctgaatgccagaggtcagggcgttgtatgcactgtatgtaaagtagggttcatcaacaattcggctcatgcgcccacactcctttcaggaaattgctttcacagccgaaaccggaacggtttcaaatcttttgttttgattgtcagatccgaaacgctctcttgcaggacatttacctgttccaaatactccgcaggtgcgtggatctgctccagatagcctgcatagcggataatctgatccagcgcccgtttcctgtattttgcgatttcccccaaatgggaataactgcggcctgacacatagcttggaacattgatagaccgaattgtttctatatcaagcgtcccatgctcctctttctcagatttaatggtggccagcatatcttccgcagaaaaacggatgccgcgttcgcagagaaaccgcagttcatcaaacaggtggttcgccacaaaatgttcagccaagggctcaaaaattacatcatcctgataccagcctccgtgggcgcaggaaattagttcacggtaacgcttttctgtgatccactggcgcagtatctctttgctcccgtgcatccatgcgtccagccgggcctttgtttcttcggggctatcattggctgtcccatagcagggcagaccattgtctttcagccacttggttacttctttgctgaattttgtgtagctcaatgtgacacccctttcaaaaatccctcaactgctcaaacttctccatcagggcatccttctggagcgtgccatccggcagggcgtccaggatgccccgcagggccatatagatttcatcccgctcctcggtttcgataaagcccatcttgttgaaggtctgggtgtaggcggccaccgcatccagcgcctgggcctgggcgtcctcgcccggttcagcggccaacttcatcagctgggaacgggtcttgcggtattgattggctgcctttttcgcagcggcggcaggaatatgctccgcaccgtcccagccccggaagggattgtccagattttgcgccagccactccggtttccggggtttggtgatccgcagatccattcccggcttgcttttccagagctgctttgccgcttttgccgccgtctccggcaggctggtcatccagaaccagcgaagctccggcatctgctccggggtggggatgtcatccgcgccgaagccaaacaggtcgaaggtggagaggttcgtcagttcccggaaccctcgcacagcggagaagttctccaggtttccctgcgcgccccagagccgcagttcctttaagtggggatggacagcagccagtccgctcagatcaaagtccttcagctcgatgccatgcagcccccgtaggttcggcagttccgtgtgcgggcggtattccccgataaattggagggtcaaaccgctgccatcttcgggggcatggatggcacaggcgtccggccccttgttctggaacaggagcagctccgttccctcacacagccacagttcctccagcccggtcatatccagcatcagctttctgatgctggtgcctcgcagatcaagtgtcctctgaccgtggttcagcaaagtcacttcatcaacaaagggggattcccgcaaaaactccagcagatccgggtgccaccgctcgcagatgagttcggagaggcagggcagagcctttagttccagcgccgaatcgaatggtgcgtactggtccatcacccgatggttgttgaccttcagctggataccgccgatctccgtttgctcgtcactgtccatggcctccttgaaggcccgccgccgttcctccggaatggcctgccaccggatctggagatacacatcatagccgtcactccagcctccgtaggagcggcagggctggtcggtgaagggcggaagtgtgcccaccagtttatattggggcgggacctccaacggcacccgcagcaggtggaggtcgcgggaccagtacatgaagtccttgtagagcgggcggagatggggcagttcctccgcagttagaggggcgtcgcccacccaatccagagagaggatcaccgcccaagactctttgctcaccgtgtctggcggcgcaatataggctacctgacaggcggtgtagcgtttcagatattggttgtagaccgtatagacctctccggcattggctttcatagtgttctcctttgttctatcacatttttaatcctgttctcgataactggcttcaatgtcaatgaaccgcacatacacggcacagacttcgccctttgcgtcatagccgaagtagacgggatagtagccgtcaccccagccggaggcaaagatgggcaggttgcagtccgtgtccggcactgtccagttgagccagtcgccgcagtctccctgatatttggggtgagctttggcattttcctccatcaagtcgcagaacaggtcgttgtaggggtcgatgtccgggtcttcttccagacgcttggcccagtaggtcttgaaggccgcctgggtctggatgtccgcaacgcagcccatcccggcgtctacgccaaagccaaaatactcgtcctcgcccagttcctcgtccagatcctcgttgcccaccatgcccagctcatagcggacaggcttttcctgagaaacctccaccttgacgcaggcatagcggtcgccgtattgttcgctgggcaccacgcagattttcaccggataagttccggcggggatcgtttgaaggaacggcagagtgtcctccagttccaccagcggatcacaggcgaagatctgcccggtggggaaatggacggcaccgatgtccagtacatccaccgccatgttcccaatcactttctctgtgaaatgggcctccaagtcatctttacaggtcaatttatccttgattgcttcgtatttgttcagccattcagttgtaggcatatcagtttcctcctgttggtttggtttgaggatcggtcagctctctacaatgcgaaccggttttcctccaatttcaatttccagctttacgccgtagtcctccgcccacgcagggcacttgctgagcagggccaggatgcgctcatccggctcccggtcaagggtcacccgcaaaatcacggaccagtccccatattccttttgaaattcctcgctctgggtgtggttcaggtagccctccatcttatccaacagggccttctgtgtttccggggagccgtcaatgaaaccgttgcagacgaggaccatcaaaacttcctttgtttcggttttttccgccagaatgtcaatcttgtgcagatccccgaacatatcttcaatcgccatcgctttcaccgatcctttttgacgcattctttttccaaatgcttgatgtactcgctctttgagccgtcccagcagcagttcacacatcggccattctgaaaatggtggggacaatttgggtagccatagagaacatgggcgcattccgggcacagccccatcatctgtgaggagcctttcaaaaacaggctgccgcactcatcacagacggccagttctttttctgccatgaggtttaccagtcccgttcccggatggcctcctcggtatcaatggggatattgaaccactccagaatgtaggccacatttgctgcaatgcattcccgcgccacggtttcgatctcgctgtcgttctcgtcaaactcctcctggagatcattgatgccgcagaccgcttcgtccagcgtctcctgcaccacttcggtgtcggtttcgccactctccagcaggtcgatgactttctggagttcgtcctttaccttgtccaccagaaaggcaggatagtaattgtcctgatacatctcgtccagcagattgtaattagggtcaaatgctttcatagggattgctcctttctcattcaaacatcaggccgtatgattcggtcaggctgccatcgtcctcatggaacatacactgatacagaggctggcgctgtgttgctttgcggaaccgctccagaatcggagccagcggctcatcggtagggatgccgaaagcatcagctacccgccgccagctgtccatatccatatcttccaagttgatgttgcgctgcctctgtccgtattcctccagtgttttggagtccgcatactcctttgcgtcacaacagtcgtgccagcagatacagctcacaatcagtgaaaaaaggtcatccatactctcagccagacggcctgcctcaccttcgctgctgtaatagccgatggagccatcttccaacaggtggtattctccgccggagccatctctggcaaaagccataccgggcagtgtgaaggttgctcgaccatccgcctcatccctcggggacaaatcatccagcaggaagaagtcaaaaagggaatcaaactcctctgccagatcagggtcatcacgcagcgctttcaaataatccatagccgttttcctccgtctactgttctggttttaactcatgcagcctttccagccacagcggttcttcaatcatctcatcgttttggtaaaaatgttccttgtcacgggccagatgatcggcaagcggtggtgcttctggcggggtacataccgcaaaactgtcccaatctgcccccttaatctcccggttgaggtagtacacccgcttggcatcgcgggaataccagtgcccaagcagttcccaggaagtcagctctgccttgggaagctgcttaccgtaagcatagattcgtttctcatccctggcaaaataggtgtcgcccaacgagaggaaagaggaaacttccgcgcctttgatgatcttcaccttgccgtctccgttgtggaagtagacctgccggctgtcctttgcatatccctgtggcgcgcccgaatcgttctggccattgtccaacacctggaaggttgtcagctctacatctgggattctcccgctggtggtgtagacggttgttttgtccatcgcgtaggcatagtttaacacccgaaacgatgccgggtctgctccacgcaggcgaatcccgccgagaaagcaggccgtagaggatttgccccagtaacgccagcagcagaagtctttgggagaaacacccttcaacaagccgttttcatataggccagagaaatatacggctccatcctgaaagaaaaactcattgtccagcgtctctatgtttgtgatcggctgcagcagttcttcgtgatgatctgttatgctcagttcgatttcgtcgtcgctataaactaagtagagcccatgaggggactttctgtcgaaatgcagttcaatgtcacaatatttgaggatcaaaggttttccgtcgcttctcatggtggaaacagcatcgggcttgccgaaaatctctatcacctcatcttgtgacatgccgaatttcagcggtgaaatgtcccacggattctgcaatatttgattgcgccaaatcgtaaagtcctgtttcatagttttccgtccagtgcctccacagttttcatggcagcggaatcaaatttacactgccgcaggtcccgttcaatcagggcaaacacatcggggaagcactcgatctcgtcctgatactcatatttcgcatacagtttcccgtactccgagatccagacctctgccgggtagtagtagccgatgtgaccgatgggctggcacttctgaccggcagcctgttcgatctccgccagctcacagccggacatatcccggaaataggcttcttccaaatggtttttgattccgttgaccaggtaagggaacagagcaaactcaaagtcagccgcccatttcagctttttctgcgccaagtaccactcgcagcacaggccgaaatacttgcgataaaaccgttgaatggtcttcatcatcgggacgccatgatcggcgtaatactgctccgcaatggaaatatccacactgcggccttcgtaccacccggcgtactccatcagttgcttaaccttgctgcccagatcgccagagatagggatgcgttctttgatcatggtagtatcctcctgtttttcgtcaccacagccggtcgatctgggtatatatcttattcggttctctgtccgtaaaactggtcaatgcgtcggtgggttctgcaagcggcatcacattcaaaatatccagtacataataccagatcccagtgtcccagtctcggaaccgcccattgcagacagctcgaccataatcaccaggaagcaaatccagtgccagctcattgaggggctgtttttgcccggtcttatcataggtatatcgctccggcatggcgccgatgtgccaatcatagcggtaacgcacctggattccggactcctgctgaatcagttcaaaagggtgaagccgcattgtgccattcggcttccattccatcagcctgcgacagtccctatcaatccgaaatccatcgggcctctgtacgatagatgcaaagtgagtaggtaggccaaaggaataataagagaagaagtctttaggcagccgcatcgctctgggatactggttccgttgtgcggcggcgtttccgccccggcaatctttataccattgcaggcggatctgctggatcagaagcgtgggcagatatttttctctttttctttcctcagctctcatgggtgatacagaaaatctccttgttcaagccaaagtagatcaccagcagttcgtcagtaatctccggattgaaggacaggtccagaatgaaaacttgctgatccatcccgtcatccaccagactgccgaaccgcttgagcttcaaaaagtccaccatctcggcaaaggacagcttggatgggtcggttcccggaaaaagttccgccgcaatatccgggcctacatcgtcccggtggaactccatgaaacatgtcacaacgctatggtagcggctgtcctcgtccgccagtgccgctttgatggcggctttggccttttccgccaattgctccgcctcatccaacattcctcccaccacatccatggcagcaggatcagcagtcagttcttcctctacatcgaagataaagggcagtcccgattcctcgggaaagttgaagatttcctcgccgggggtatatgtaaaatcaatgcgtttacagctcagtttcataatgttatcctccttacccctcaatgttggcagtttttaggccctttttcaaggagccgtagaccgtcaccgcatgatcggtgaacatctcgtcgcagtcaaaccaggcggtgaagctgccgccggaggtgacggacaggctcgtcaggctgatccgccgggcaagttcttcctctgtgatggggtctgtttccgggtcacggggattttcttcatcttgggagagccagttgttggccagctcggtcaggttcttggctgcaagctcccgcatggctttgtcccaggtgtcacagtcggccagcagtttcttggcggcactgcgagcgcgggtccaggagggcttgctctcggcattgacttccagagaaaggctcacatcctttccgcaccactggatctcgccctcgaaggtatcatagtccttgtccagtgtcagttcccccagcacctggtcctggatcaccaccggcttgtggtattcctccagaacggcctggagttccgggcagtcctcatgggcattgactatctcggagatacaccaggggcgcaccaccagatcttttgcccgttcttctttcatccggcggatctttaggcgacagatctgctccttgccaaagcgtccccagcccttatcgctattgcgttcctcctcggtgaccggccaatccagtcgctcctctttggtgctgaccttgccggtgtcacagaacatgatacccagcgtcacaacggtcatttcccaaaagttgcctttccagttaaatccgcccccaatgcagcgattgatcagagcgaccacttcctgctcctcgggctcgtacatctcatagaattcttcaaacatagatcattctcctcatccctctatatgattgcggtattccttttcaagctgggtgtaccaccgtttcagcatggtttccagactggtctttccgttgcgatctgtaaaaacaagaaacttctgcatcagtctggggaacagatatttgcccgcttttgtcagatcctgattgagatagaccatccgcaggatacggccctgccggtccagagggtcctttttcagcagttccttttcaaagcagaagcgcaggaataccacattctcgtcgtagaagtcctccaccacagccgcgccgatgctggtgtaggtgatgtcgtacaccaaacggctccaatcaaatttctcggcatagagaagtttcagcgccttcgcccaatgttcctccgggatcaccagcatcctgtgctgggcggtgctggagtagccgtggtagacgggttccggctgccccagcagttcactcacactgtcggcgtagacgaagcacaactcctcgtcgaacagaccaccgataaagttaccattgcagtacagcatataattcttggacttggccggagaataagagaggttatattcctgcgagtccaggcttttatgtaccttgttcagaaagtctattgatgtcatggctttactcctcaaactcgccctcgatcatcccgttcagatatcggccgggatttgcgatgaagtcatcccatttggccagagggtggaattcctcatgctcgatgtccagataccacagcttcttgtccctggggctccacagcagcagatagtcgctgtagttatccatctgcaccatcagggaaagcagcttcttccgtttccaggtcatctcctgcacatccatgaaggagtagagctccgcccacttcacccattcctgatccgggaactccagccgcagggggccggtcttcaagtattccaccagcttggcgggcagcttgtagggcatgagctgccggatcttttcctgctcgttgtgccattcctctggctccagggccttcaggtagtcggccatctcttgattcttgttttgaactgccacactgtagggacggtcaccgtatttgtcaacaagggtgatattcgctccctgttccaccagccagcgcaccatggagaaattgttggagcgggcggcctcggtgacaggggtggaggcgtaagggaacaccatgtccggcttgtggtaattgatatccgctcctttttccagcagcagcttggcaagctcggcctgtccatcggacaccgccgcccggaatgcctcgccgccaaacttgtccactgtgatcccggcttgctccagcaccttgatgttctccgggcgtttgccccagcgcacttcctggaaggcccgctctttctgcttcgagctgagttttgcggcctgttcagcaaagagcgccaccacctccggcccacaacagcgggcggcggtgagcagcaggggctgttcctctgccagaccgggatcagctccatgctccagcaggaagtgaatcatgggtacatcgttccgaaaaaccgcgatctccaatggcatcagcttgatgtattcgctgagctggatgggaacatccaaatccagaccgccctggagcaacgtctccagcttgggagtgtcgtggtcacagatggcggcagccgtttccgggagggtctcccagcggccaatatatgcaatttggtacataaggcacctgctttctcgacttgtactcattcatccccgaaccgctcagcagcgtctttgtaaacagtgatgctcttagccaccttctttttctggctacggatgcggaaatagtcccacagaacgcgcttcagttccgggttctccaccttgaggggcagcaggctgatgaacatttcgtcgtagcttccatatagcacaccgccccggttgtaggtctgccatgtcaccgtaggtttgcggccctctgggtccttggccaaatcaaagagccaccgctcatccagatccacatagcgttcaatcataaaccttgtgtcataggttccatagctataatccccccagaaaatcagagcaatcattccatccgggcccaggcgttcataggtccagtcttccggataacagcggtaatggagcattcccagcgcatggaacaaatagcctttttgcggcgtatccagaaggggtgaataggtctcgtacacctgctccttgggctgggtgatgatcgccttcataaagaccggcatcagccagctgccgccatagcgttcattcagctcatcagccaatgcttgcagtcgctcatccgggttgcggatcagggaggcggtaagtaccacagcgggaattttctctttttccttgggtgtggcatcccaaatgcgaagcccgtccgtgatccaccaggaggtgcagtcatcatcggaataaacaggcgcgcgtttcagctgggcgatccgctgggtgttctccgccagaaagcggtagacctccagcattttgggcgaggctttccccaacatcaaatggaaacagaagttcagttgttctatattcagtggctttgtgtccccctcgtccagcagctgggagagagtcttcagaataactggggcaatctgctccgatacacagtcggaacaggcatccgacatgatattgctgcccatccatttgcccttgaccagcttggcccacagtggggcagcaggggcatactccagctgcgccaaagccttttgagcagccgttttgcatttgcccttttctgtattcacaagctggaacagcagttcgccgtttgcttcatccttgcccagctccaaaatggcctgttctcgctttacgcccttgggaggcagttgttccaaagtcatcattcattttctcctatcccacaatggtggtttccttgacggccagattgtcgtaattcatggcaatcagcttctcggcggcttctggggtacacatgaaccaggtgctcacgccccaggcatccatccttgtgacgatgaaaaagtcagtttcggcaggaatcggatttctggcgtcaagatagtgatcggcgtagagatacaccagatctacctcccgctccggaagccatttggcccggcgcacacggggcttgccgtttttcagtgccttttctctggggttctcaaaccactccagctccttgatttgcaggccagtgaaggtatccatcagccgctgggcaatctcccggtgggtaaacacgccgcagttccaggagcccatcagccatgtctgtataaaatcccccaccttgctgccgggggcaggaggtccatagacgctctcatccgcccacatgacttccatcttttcgcactgatccggtcgggggcaggattgcttgttgccataacgatacatgatatttacatagccgaagtccttgccggtccggtcatggccgacggcttctactttataagcggtgattgacattgcagttccacctcctgagccagtacaaagccgcatagcccaagggaagcgtcgatgacaaatacccggatgtgctcccgatccatgcgctcccgcagttcctcaatgctgcaacaggcgggaaagccgtaaaggatggttccgcccaacaggtcgttgtactgttcaaaaaaaccgtccacggtgatctcgtccatgccgaaaaggatgttgtcctggatcacatcctcaaaccggtgggccagcaggccggtgaagcgaacagatacgttctctccggcctcggtctgggtatccatgtgcagggaatgggcttcaaagtcagcgcagtagcgcaggactctgttgtcgtgcagattgttgaaggatcgaattaccatactcatgccagctccgcgtccaagatctggactggtcttcctttctcgttcacatagtaaagggcgatatagtcgatgccgtcccgcttgacctgctcccagggcatccgctcgccgttgatcagttccacggtatccgcctcatccggttcgaagtcttctttttcgtcctcgtagtccacgctgtaccccagctccagcaccagcttggaagcggggatctcataccgcttgaggggacggtgttccagctcagatggatcatgttcatcgcagaacatattgtcgtagccatgccgtccaccgtcaaagatgacgaactcctcgccgctctccgggtcacgggctgccaccagtccgggagccgcatcgccatctacaatataggattggggctctcctttcaccgtgagcagatctccgtaataccaaacctccagcagttcattgccggtagtggaacagagtgtcacggtgggcagacgcttctccgcccactctttcacatggccggtgagccaagtgggatatttctcagtcatcatagtctttctcctcctatttcaatttcagtacaaatccccagatgctcaccacgatcaggaggacacccagcaggaagaacaccacccgccggtatcctctgctgtggcggtgggcatcccgcgtaccagtggggtcgcagagccagttccagttgcggatcgccccaattaaaatcacggccccgatgaccaccgaggcaatataccaatgctcttgcaaaaatgctgtgacctgttcgctgttcatttacagatacccccctttacatcatcgggagtttcctttcggatgatttcctcccgctcttttaaatccagctccagagctttttcctcctccagatattcctcgcagtcccgaaccagcttttgggcggctgggtcatccgggaccagggccagccagcgttttgcgtattcataggcgatggcggcggaacggtatgccatcaggcaggaatagcccatccgggagttccagtaagggtcgttctccccctgggtgcggacggatctcagaagatcgatggcgtgccggagaaggtccccgtccacttcaccatccgtcccatgcgctccatgatctcccagcaccgccagattgctgtaagcccgactcagcttgacggtcagcagatagccccgctcctgttccgggatagcctcgatggcctcaatacatcgtgagaactcgtccgcatcattccactcctcaatctgctccagcagctttgcttcttctgcctgattcatcatttcaccgccttttctgtgtcatcctttgccttttttgaagtgtccgctgcctcgccaggtgttgaccacacaggtgaagatctgaccgcagtgtttgcatcggatcgtgtgagccataatttcgtctgcccatccatcctcagtctttaccttctccagcggacaggtggattcctctgccatcagttcaaattcgccttgtcctaccaactgctggatataggcaatacaggccaggtagtccttgggggcatcaaattttctccatgtttgaatgtttcggcagtgctcgcacatacagagccctccttacgcaaatacttgctggtatttctctttcagttccttcggtgccgtcttgatggccttgctgccaccattttcggaatcctttccccagatggcccagagcaggctctgccaagcgatggcccggaatttcgggtctttgttttcttccggcaggagataagcggaaaaccggcgcttgatttccagcagcgcatcgaggctttccgcattggcaatcaggctgcgaaattccttggcaggctccaaccactgcatagacaatgcaccccgcaccaatacccccagcgtccatggttgaaacccaaacttccggatcaaggcatgaaggaatttcccttgcagagaggagtgctcgtcgtcgcagagatccagatactccgttaccagcggtgcccaccgttctccctccagccccagagcgaacacagcaaaggtgccgggcattgcacaggcttcatccgcgaggttttggtaccactcaaactcccgcatagccagacgagcatatcgctccatagctggatgcagactggggtactgcacagcgcaggcaaagagctgattgactcccttcttgggcaagccgggaatgggcagatagattttctcctttcctctgaactccaccgagtaactgcggggaaattcctcctgagaaagcaccgcgcacaggtagtccagggcttcatcatagcactcctccgtggaatccttggcggtgattcggatagtagcgaaagcgtcgttggccgaagcggtcaggtgctttgttttccgtttttggatgttagacggtaatttgccgctgccattggttttcaaatcctttactatgtcggggcggatctgggaaaccagaccaagaatgtgttcggttttgagagcttcaaaactctgtccatacaccgtgtagcagaccgccacatagcaggcaaagtgcagcagcccttcgtccacatcctccgggcgcaattccggcaacaccgtgcagggcggaaagactgtaaagccatcttcacgctctcccacaaggaaatagcgttcctgcacctgtttttctatgtacttctccaactcatagcagatctcttgccagcccaccagccgccgcatggcatcgcagagaaaaacagcatcctcgttgggaaatcccttcagtggcagactggtcagatagcgttccagcagctgatccggaaggaagggcgttccattatggtttcgcaccacggtcgggtaggcggagtgattttcacgggcggtgccgttcagcacatcctgaatacagatatccgcttccgccagcacctctggagaagtgtccggtttatgaatcagatagtagcggtcatttatgccgtcgcgttttggcaaactcatgcttgatcacctctgtttagacaataaaaacgccctgcgacaccctgtcacttggacaggctgacgcagggcatgaaaaggccgcaagggagacgccacatccaccggcggatgtggtttcttcttcagccaaaatcaatttttcatatttgaacagaacagccatggactgtcccagtttttcttccatagcaagacctcgggttacaaatctcaaaatgggtaaactttgttactctattatatcacatcatctgttttctttggaagagggatttgctcctccgccaaatttgtgatgtggatttttccctttctctttccagtcccagcatactccagcagttctttggcattgctggcgggatgccgcacataggcgatgagaaaatcgctgcgctccaccatgtatcggtttgctcggatgatggcaagccgtttggggaccgcttccagatccggcggatagaacagggcgtcgaatgcctccggcagatccacctttctgttgaccgggtaatatggggtcatcagcatcagtgtaatatccgggtgcgctcgcttggcctgtgacagcgcccggatcaccagacggtcgaagttcccatactgtcccaccacaaattcagctacgccatattccgtgatatggtgttctatggtttcaagcaaggctgggtacacctggtccggtgtctccctatgccctataaagaagcagcttcccatctgacagccctcatacacagtcgcagtcatattttattgattgtaattcataatagaactataaaaccgacacccattttaatgattatatcaccaattattcgttgtgtgaagcgaaagttgatgatttaagtgcgaacccgtgacgctcccttatattaaaataataagtaaagattggagggagaggatcatggacgataaccgccgctatgaagcatttgtgcgggaccgcatcacagagctgcgggaacagaagggcgtttctgagcatcggatgagcctggagcttggaaagagcggctcctacatcagaagcatcaccaatggaatttctatgccctctctccgggagctgttcaacatcatggaatactttgatttgacgccaactcttttctttgcccccatggacgatccggattccctgcgtgggatcataggcaggaaactgcttgccctgccggatgaggacttggagaaagtagttgtttttctggactggatcaaaaaatagacgctcctgctggcgtttgacatgaaaaatatgccgctcagtcagtttctgatagtttctgacatgggcggtttcttttttgcgctcttgggggaaagaacttccggctattgaaatttcaagctctttccactaaaatggatttcatcgtctgttatcaaccgttccgattacaaagcgaggtaggaaaaaatgaaccaaaaagaaatcaatgagctgcggcgccgttttcgcccggaaaaaagcgccatcagccgtgtttatggatgctatgtcaacagcagtaaagagatcgtttccgatctggacgaatccctgggcatgatgccgcaggaggagtccgagaagtatttgagccttttgaagaagggactgtccggttccctggggaaaaacctcattgatatcgtattctccactcagcaggtagtggacagtgaggaacaccgcctgctcaccacactgcgggattcccagcttaaggacaacgaggcccgccagaccttttaccgcaaggtaattgacagtctggacatgggggacagcagttacctgctgctcctgacctgtgacagctacgatgttccccatcggggcaaggatgattccctgcaagcggatgcctcggatgaggtgttcacctacatcgtctgtgttgtgtgccccatcaaggagggcaaggtagagttgggatattttccaggtgacaatgaattccactgtgctgccgggcaaaccgtcgctcctcctgagctgggttttctgttcccggcattcgatgaccgggcagcaaatatctataacgctctcttttacagcaggaaggccaatgaaattcaccaggagttcattgacgcgatcttccatgtggaagcgccgatgtctgccgttgagcagaaggaagcattccagtcagctctgagcgatgcgtttgactgcagtctggaagtgatgcagactgttcatgaacagctgcgtgagaaaatcaaggagcacagggagagcaggagttcggaacctctggagatgagtgcctcagaaatagggcaaatccttcaaagctgcgggattgcggatgaacaggtggcagcattccaggaaaactgcggcgagcagtttggttcgggggttgtcctgaatccggcaaacctgatcgacagcagccgctttgagatcaagacacctgagatcaccatttctgctgatccagagtatagttacctggtggaaactcaaattatcaacgggcgcaagtacctcctgattcccgcagaagatggcgtggaggtcaacggttttgctgtcggcattacagttgcacagaaagacgattaaatttcaaaagccggacacaacgcaaggcggtataacctataaggccagatgttgtttgttattttctgtcttaaataaaatccttagagtgggcgcttctggttggttcatcacgaaccgggactcggttcacatgatatgtagaccctccccttggcgggagggtttgctttttacaggctatctcaccagacggttccttgcttccagtgctgatgcgcagtcatggcctgtcaaatactgtgccgcatccagccattcccattcgctgcatgcacctaaagggatcgcggcagtgagcctgtgcagctgttcactttgctgggacagccgaagatcagaaagaactccgcatcccatttgataagccaaataatccagtagatcgatctcaaccagcattggacacctccgtcataccacatgatacagattggaagtaagactcccattttcccgccagcgtgggtccttttgcagcagaccggccctgcagagatcatccagtgcccgcttgaccgtagagcgggaaagccccaactccagagcaatggttctgatggccggccagcagcgtccctcgctgtctgcacgatccttgaggtacatatagacgctcctggctctgtggcttagattggaattgtagatatttctaaagctgttcattctgcttccctccgtcaaggccgaaataccgttttgcggaaatccggtgcggcctgaattccctgagccataccgccagcggatgtgccgcctccctgcggctgctcactatccattacaatcgtcccatagtggcggcggatgatggactcctccaactcctgcttgtcagcataggcaacgaaccgctgggccttctccggcacttcatagggcttgccgaaccggatgccccagtcgaggaacagccgcagcttgaccttcatggggtggacgccggtcttggccacaataaagctgcccttgggcatggacttgagttcatccggggtcatgaggggacgctccatcatctggagggactggctgggatcgtttttcccgcgggagatactgccgctcatcaccgtccggctgcccaaagatttggacagttccaccgcagtctgactggccggagcgaagccgccgtaaaggttgacctgacagttgtccacgatgatctcagagccctcttttccatagtttttctgcagctgtcccgtaatactctggacgataggcaccaacatgagtcctctggaccgggaggcggaaaacatcagctccagcgactggatgggcgggcatgtcccaagctcatctgcaaagaagaccacccggttcttgagccgcccgccgttctcgtcggccacggtgaggatctcccggtacagattttggaggatcaggctgaccatgaaatacttggtctgatcctcctcgggcagtacgataaagatggcggatttctcattgcaaaacttctccgcgtcaatggcggtgtcaaagcagaggatctgctccatctccgagtcgaggaaggcgtttaggcgggacagtaccgttgagatcacggaggccatggcctgctccgccgtgttgagggcggacccggcaaaccagcgggccttatgattaggcgggagcttttccagcaggagctggaactgattctttcccttcacccggctgggggccagcagttcctgtaccaacttgaacaccgacacgatgtggcgcttttcaatgggattgccgtccgcgtcctcggtgggcaggtactcggccaccagcaggaacatggcagtcagaaggccctcggcggaatcgtagaaaaaagcattctgcccatactgggcgctgtcgccgccgctggtgttgatgagggtcttggcgaggatcttggagtatttctctgccttggcctttgccgccaggtttttggggtcggctttatagatatccatgtacttgttgatcagatgaagcaggttgttgccgtccgagcgggtgggattacgcagatccaacacggcgatttggtatccgtagcagtccttggcaataccggcataattgcggaacaggtcgcccttggtatccgtgcagaggaaggacatcccgctggcgagggcatattcgatgttggggtacaaaaagaacgcggtctttccggcgccgctggcggcggtgaccatggcgtggatgtcatcggtgtccaccagagctgtaacatggtctttgggcccttcgcagccaaggacaaggccctgcttttccggcagatgctctcccttgcgccacagctctggttcaaaagggacatgggcataggtctgccgaatctcctgtttggtagcccagcgagcagtaccgtgctggccgtcgcccacagtcttggatttgatcccgtcaagggtatagtaatgagagagaaacgcgaggccgccgatcacgagaaacatgacagcgcctaccacgataagcgttataacttgcgttggcacatgatcctccttttgatatctacgccttaatatcagaaggggatgttcagtttccgctttgtctgctataataaattggtatgaggtgattgctttgatttgcgcatgtgaccattgctactatctgtttgaggcgccggaattgccggagcaatgcccggactgtggaaagcaggcaacccggccagccaataagcaggagcgggcagaatatctcagcagacaaacaagcagccaggaagaagcggaggagtgggactgagccattcctccgctttgctgcttcaggcttaggccatcactggctcagcttccctctgggtcttttcctctttctgccgccgtttgatctcgtcggcctcgtacttgaccggcaccttggcacaggagatggccagctccagccatgcgctggccacctcttttttctctgcctgggtacggataccccggcaattgttcttggccaatacgctttggaattgcatggcgatctcatccgcccggttcttgaggataccccggttctgatgaggcaggatgtggctttctaaaaaccggacgccctgctcagtggtcagcgcggtacccatctgtttgcactcccgcagcaccaccgagagggccagcgccgccatggtttccatgcgctccatcgcctggtcaaagcgtccccaatggaggtcgttccggtaccgcaggagcaatccgggaaactggtaaaccgcccggtccggctgaacttccttgcacctggctccgattcgccggcagacgagccccgccaccgcaaactgcggatgctcctcggcgggctgggcctccagtccatgccgcgctttcagatcctcatcccagtctttgtattcggattgcagcggggcaatttgagaatagccatgctctcggagaacttctgagagccggccgacggcctcgattccggcggcatcatgatccaggcaaaggatggctttccgcagatttggatttttctccagcatccacagcatagcatgtcccgccgtaccgcagagagccacatagctgtgctgctgccagccgtccgggtacagggtgagaaaggcaagcagatcgatgggggcctcgaatacatagaggcggtcgctggtaccgacccagtggaaactgcaccgcgtatcactgccctctatgttgccccggtagcttttgccttgggtatagagccccctcttgtgggcatgacgggcaacgccgcgttcatcgaatccgacgaacacggcgttgtgatacacctttgtctgatctatggacaattcccggctctcatagatcagtcccttctgtgcgaaagcgcttagtacctcccggctgatgtgcctctgctggagcagataagcatatacccgccgcatggtctggtttgagggaggcagggcaaattcctttggcggctctttttcttttttctccgccggtacatacacctccccctgttcaccgttgagcagacgggtcactgcttcagggtaagtcaggccgtagaaattttggacaaaggagattgcatggccacccctctctgcagcatgatcgtaccactcattcccatgcacagtaatactgtgatccgaggtgaggcgtttgtcctggccggaggagatgagtttctctccctgccggcgcaggaactccaccaggtcaacggagttggcacggagtttttggtcctctgtgaagtggatatatggcatgctacatccctcctcatcaaaaagaggccgcagtatgcggcctctcaaatctgtgttaattcattcagttggttggcatctttcggagctcttggacttgatcccgacgcccatagaccacagcggtagtgtgactggaaaggtgcctgaaagggtaactgaaaaagagaaaaagatttcagaacttcttgttgaagctccagaggctattaatgggagtccgcaggttcatacctcatatgcctctcactgattccttcccttgagtttccggtggaacagaacaggtctgcacgggattggcttttgccttttcagcccttgaatgtcttttggctgcgccaataaaatctgctgtttaaactgcactttctgtttcaaaagattacctcccttatagctgcatttccggctcatggtcatccgccttgtggccctgagcgatcttcttcgccttgatttttcgtaggagcttccgatccaccgcgacccggacgccaccggagggcggtggttggttttgctcctggaaaatgttggccagatggtggaacagcgaaatgacggccgccacaggaggctggcccaagcggtcatccatgtgttccaggaaatattgagcatattcattgccccgatccgctgccagctggaaccacttgatcgcactggatctatcttttgggacctccttcccaagcagatagagcttgccgagggcatactgggcgtattgattgccctgttccgctgcggcggtgagccagcggatggcggctttcacatcctttggcgcatcttccccctggagcagcagcttgcccaggcggtactgggcaaactggttcccaagttccgcagcgtatgtgagccatttcagtgcggccgccgggtctctgggcagggctgcgtcaccggcaagatacagcttgccaagagcaaaggcggcgaagctgttttccttcgttgccgcaagtgtgaacagagccaccgccttttgaatgtctttttccgcgccctgaccatccagatagattttgccgagcgcgtattgagcacagtcctggccggcttccgccgcctttgtcagccgctccaatgcctgggctgtctgctccggtgtagaggatggatcattgaaaatcatccgggccagttggtactgcgcgtggggattgtccagtttggacgcctgttcaaaccactccctggctgccgtctcatctttaccagtccctacaccatggaggagcatccatccgatgcggtactgcaatttatcgtcatggctctgctgctccaattcgagaaatccggcgaaggcttgccggtaccactgttccgacgcttcggcgtccttctcacagccaatgccgtcccgatacatctttcctaactcgtaggcggcataggggaagtcctgctgtgcagaggctgtgtataactccagcgcccgcgcatcgtcctgttccacaccctgtccacggcgaaacaggccggcaagggaatattgcgcatacttgtaccctttgtctgcggaaagttggaaccaccgggcggcatcaccatagtcctgcttacagccgaggcccgtggcatacagtttgccgatccggtactccgcatagcgttttttcttctgcctctcaacagcgtggaaagcggccagcgccttgctgtaccacacatgggcggtctgcatatcaatctcccggcccagcccgtccgcaagcatccggcccagatcgtgcatggccagcgcattgcctttttgcgcctcctgttggaacagggtaaacgcctgctcaagatcctggggctgatccttgccgccaaacaaacagcggcgggccaggcggtactcatcgctccagttcatctgcgctttggctggcgcagacaccgttttgtctgggacatcgtccggtgggaactccgagaaatcattccagtcgttatcaggctggggcgcctccggcagcggcgcttcttcctggtcctccacagggacacggtcttgctggtcatctggatggaaaacctgctggcgcgcccccagtgttaccgcttcctcaatgacgatgtttttgatccgcttgaattccttctgctgggaaaggggaaggcgtggaggcaggtcgtccttgtaggtgcgcagcacatcttcccgcagttcataccacagggcataggctgcggcgacacatggctctttggtcagctcgtccacaatctcatccaccacagccttcagcggagccttgaggtagccgtactgcttccggcctccggtgtgccgcaggcgttccgccagatgctccatgagcttctccatgcggtggttgaccacggcgccgctccacatctgttcaatcaactgctccagcacagagcgggcgtcctcattcagcgtgttcctactctgggtctgcttctggtaaagctccgtcagctcctgccggaagatctcttttgccagtcccgacttgatttgggcgatgccctgcgtggtgaggaagcctttcgacggatcggcgctgtagcagaccatgtggatatggggatggtgtgcttcatcatggaatgcagcgtaccaccggaaatcctcccaggggatcttcgtcgcctccgccatttccatggcatacttggagagcagtgctttccattcttccgccttgtcatagccgaggcgggcggcgtcttcccgccgcagagagatgatgggcagccacacattaccggggtgggccgcgaccgcttccgctacctgcgccagtacgagctgatcttcctcgccggtaaacaatccatgggaaccgacgcgctgggcgcgggggcgggtggcgatgtacttcagatagttatccttcttggcgatctggtcatagttgtcctccagagcgcgagtgatgaactccgatgcgttggcgcgtgttggctcggccgcatagtcctcgtattcaaacatcccacggctgagcgggaagtcccgcagaatctgttccaccatctttttctgctttgaggtggccggccactcactgcgtcccggatcgatgcgctccacaccattccgtgtggccatatatttcacatagttttcaagatgagcggtggcggaggaggtaccgcccttgatgtaggggcacttgaaaatcaggcgcggcacagactgtcaccacctttgtgcatcactccacgccccgctggtagtcgatggcgtccttgaagctgatgcgcccattggtctgcttcacttcacggacggaccgggcgcggagtgtcttgagatcctcgtcactgatttccatgcccgccgccagtacattcatcatcatgttgacctccaccgccagtttgaagagcaggcgggcgatgcggttctcactgtcctggacggtcccgcgcatggctgccaccagtgcgggcggcagatatgctgtggcttccttgccggaaacatagccggcatagaagcggattgccttttcaataaactcgttctgactttgacagttgtcccttgcacaaagatttttgaccaactgctggttttcaggcgcaatgcgcagagcgaacttgattttttctctcgccatactttcctccaatcaaaaatccctgacctttgcatggccagggattcgtctttttgagtgacttctttacttcaaagctgaatgccgtccatactttgattttgtgcatcttcttctgtccagatccctgttttaatgccggataaacgctggagtgatgggccattccagccgtggtgacccccggtgtgatcccatcccctgaaaagtgacccccgcaaaaccgttccccggcccgcattgcggggcggtgtgagccgagcgggggacgctttgcgacccccgctctttatcccgcactattttcgacccctcggtccacttcgttccaaggagcgttcggcggcacagcgggaaccgtccatttgtctgcttctttgaaatagccgcacaaagccctcaaaaatcctccaacagtgcggcaggggtacggatgctcatctccccaggaaagggcacacagggccacacaaggggcaactgtgggattaaaacggcaagcaccgggcagcatccatgccgcccggtgcttttgttttcaacaggacaccattcccattgtggatttttcatcttccgttcttttaatccattctgtcatactttgacactccatcagtaccatcgccaggttgaacatttccatgcgttcattcagcgtgttcaggtgaatcgaggtttcgaagagaccctccagtacctcgatacattccatgcctgtccagttgagtgccaggtctttgtttggagcggatgagggttccgagtctcccacttcaactctctgtacatattcccggtcttgctggatgaggtcaaattgctcatttgcgtccgaatcgttcagcccccaaacctttccaatcagggtgattgccctcgcatatccttctgtgggagcgttgctgcctcccatttcgagagctgcgcgggcctcttgcgctaatttctcttgcaggaattttgcttttgctcgattcattttactgcctcctttgtttgttttggttcgttgccagccactacaatgccacggtttcggcaggaaatccattcagagaaaccatcaaaaaacaggcttgatacctggctatgacgaacaaaccagctcctcagcggctaaattttggcgagttacatcttcagccccagtgtttcagtgctctccatctccatcaggctgtcgcagaaatcatccagcgagaggccagtttcttttgtgcagtaggcatccattttctcccgcagcaccgctttttcgttatcatccaaccggtaggtcagttcctcatctctgctatcctcccggtggagaatgaggtcgagggtgtcacacacctgtcgatctgccaaagagtagttggcataaacattgagccaatcactgttttcatccgttaccacatgggttccaaaaacctcatccacatcaaaccagcaggagagataaaaattcagcgccccatttacttcggaaatttccccatcgaactggagatcatcagaccttagacggcggcttccctggagcccatccggagcaacctccagtctgctgacctgtttgtcatccagatattcaaagaaccggcgccaccgttcatcctggctgagatccgattttcggtaggcttggtaggcggctgtggacacatctttgatgtggaaggtctgccagccatctgaaatatggagacaggagagcagccctttgtccaaatcaatttcaaatatcccggagaccttgcctgtgttttcaaggcggagttctgccaattcacggaaccgctgcgccgggatctcctctgcatggtcaaatacctgggcgaactctctggggggggtggtaaattcgtttctcagataacgccgcaggaacacggctacttggagaaactcccggccatttttctccatgaggatgtactcctgcccgtgttcccggatgtgcatcgcacagaaaaccttgcgggcttcggcttcctgtaccgctgccagccgctcctttttgatgcgccggtcaacctctttctggcgttcaatagggactcggtcgctgtaaacttcaatcagatagttttgcaagacctcctcaatgtcggtcccatcctgttcaaggatttcctgaagagcttcccagcgatagggatccagccaaatctcagccggcatatctgttctcatcaggtgtcctccttctccaaatccgaagcagggtgggtggagcggctgagcctggagcggggctgttcctccggttccgccatgctttcaatgtactctctggtctgggatggtacatatttcttgtagagtttttccatgaatgcatccagatccgattccaaagaagtgccgttctttcccgcataaaactggagggccttgagcttctcctgttcataactgacggtgatggtcattcttttcattggttgtccccccttacataaagtattccagagcgtgagttgaccgctgagagtcggcaaccgcctggtcataacaggtcaacagctcaggctcgatcccagtcagcgccacctctacaccataagctccctgtttgatggaggctacacgcgcatccagaagaggggcaaactgtgctttgccctggtctgtcaaggcggcgagatctgcggcagggataaagccgacatccgctgtctggtgaaccagatacacatcgtgatcgggcaaccccagggtcaccaaattccgtaggctgatgccttgctccaaatgggaattggcaatcatgcgggcgcctggaatgaaagcagcgtatcttgcccagtcatatccctctgaattgaccaagacgccatcctgacttccttcccctaaaaacagcacgcaatgctccacgccctcctcacagcgcatcagagatttatgtgccgttatctgcggctggtcatccattggcctctggagaaggttttcaaacgaaacggcatccagctctactacagcttctacctgacacggcggcggcaaaagcgaagatggtttgcggtttagaaacgcatggagcttcaacatttctggctcctttctaccattggcaggtaatcagcgcaatgccatgccgggttggtgggggtacactcaccacaggcagcctcctcattggggcagttgttttgtcgggcacagcgggtgcagtcgcagacctgacaggtggatatcagatttctttccatagggatccctccttactttggatatatcaggttgatggaattatggcagatagcttctcggattttgtttttcgccgttaatccgcacctcgaaatgcagatggttaccggtagagcgcccggtcgaacccacctcagcgatgatatccccagcctgtacctgctgcccctcagctaccaacagtttggagcagtgcgcgtagagtgtgacgaaaccgccgccgtggtcgatcatcacatggtacccatagccggtggtggagtagcgcaccaggtagacagttccagtgagggcggcccggataggtgtccccttgggcattcccagatcgatgccggtgtgtccggcacccttcccggtaaatgggtctttgcgccagccaaattctgaggtcaccacactcctccagctctctccgatgggagagcagaagccatccgcgccgatgaacggtgcgtcggaaagaggcaggccatcgctccagatgtcaaactcagaaccataggtgggggctggcccaccgcaaaggatacggtaatagatctcggtggcgttggcctgatcctctgcggtgatctccgttcccatcttggagcggatgttttcatagacaacagagaggtcgcggatgggtaccgccactgtgtaggtttcctccacctcgacctcgttgccggcgtcatccacctcggtgacggtgcgggtgcgctcctcataggttatgaaacagtccagatactgctggtgcgcccgctggctgggctgcttctcgccgaagtaaagagcataaaaaacggccttgaccctggtctgatcaaggctatcgccatcttccatctgtccgtccaactccgtagcactgccctccagaatggaaaaactatcccgcatattctcgatatgccctcggtaatcctcgggtacagagtcggaaatcaccccgccgtggaagcagagttccagtgccgtagtattgtggtcggcagtaccggaaagcagagaacagagaagcaccagcagtatgatgatgggggaaagaatagccactatgacccaaccgacagctttccgggccttttcactgttcagaactgccgctgctgcttttgccaacatcgccagagtcgcaggatcagccaaggctcattcctcccattcctggatcctggccctgtgctcgtccgagatccagctgctcccagtgctcagacaactccgccgctgctgcagcggggaggtcatacccgatagtcttcgtccaggacaggaacttctcataatcagtgcctttttccagtaggagcttggcggctcccagcagatcagcctgaatgcaggctttgagggcagacagattggtgggctgaattttcattccatctctaatcagctgttccaattcccatgtgtcacctcgctgggcatattgccggatgacctcgctggcccggcctgtgatgtcaatgcccttcctggccagagtaaatgcggcgcggctatcccgattatagactgcggccagcatcagttccgcaggtgcggcggcgatctgctcatttgtggcgtaatccatcatttctctgccgatataaggattcagggaatatgcatcccggatcatcctgcccacaaaacccggctccatctccagaatgtaggtttctgcctgatccatcagaaaacgcaggcgctccacatctccggttttcactgcaagctttgaagccagtagataggattcgctgccgaagtggtcacaggcagccatgaggaggatcatcatcttgctgccaacctcaccggaccgaccagcagtttgggtgagaaggtcgtcactatactccagcacttgcgtaagcaagctcttgaaggcatcgagatttccgtcccgcactgtcagcgttatctggtcatagtcgttgatctggagggggaggcgccccatctggtcaatgtactgggtgatgcctccggtcatacggcgcaggagactttctgtgtttgcaatcagccccagatacttttcatgttgtgtgatgagggcgtcaatgatagttttctgctcctctgaactaaggtggaagaccccgctggttgggacctggctttccccaagacgaatatatctggcatgggttgccccgtctccatggaaagcctttgtaatagcggaggagataaggaacatattgtccagatcatcaccactctcgcctaaagtctttccggtgataaagcccttggtaacaggattcccatcctcataccatttcaggtacacatccaaataaataccctcactcgcaccataatcggtggtgcagaagatatctgcgcccttgggaatctcccgtcccttctcccactgttgatccagcaggaaatattcgtcaggtaggcaacccatgttctcgagctgttgccgcagctcctcaaagacctcctggccggtgcgctgaccaatgtattcacttctgctggggtcctctttgctgggtacccagcgttctgtttcaatgattttcatggcatcctcttttctatggcagttcaggtttctcagattcaagccggcaggcacagggcaggtcctcatcggaaaacgcgccggggatcaccatttggttttcgtccgcagtgataaaatcccgccatgcccagtctcgccccaatccttttacagagataagattcggcattgccgtctcctcgatagccaaagctctggccagcagatccggatatctgtgatatagcgtccggatctcccgccgcttcatggaggggcagaaaaagcacgatgattttccggggagaggcagccctgcgctctgaattgcctgaatacagtctgtgcgtcgccagccccaatccatcagggggtattgcttctgatactttttatccagcagatcatgggctaccgccccctgtctgcggcgttcctctccggcatcatacccaataaatttgaccaccttttctccctttgcccaggtatccaggcagggctggtattggttgcaaaaccgctcctgtggggccaccttgtgtttgagggagcagcttttccggccataggcgatggaaggaagcgtcccggagcggaggcactcctgttccagagtaagcctttgcccacttttctcctgataccaaacgcgggtaatgggtggcatatcatggcttttcagccagcgatccatgatttccagatacacataggtgtgcggctgctcgccgccgggatctgcaaataaaatgaggtctaccgggatatggtgtttccacaggccaatcaacatggcagtgctgtctgtccctccgccatatcccaccacattcatcgtccgcctgccttcccgaacagcgcctccttatatgcaggggcgtggacctccagcagataccgttcatttccgcagcggtagagacagacgccccgttgggggaaacggatgaggttgtactccgactcctccagctgcagggcctccatgtagaacttcttgtccacagcgccggcattgaacaggaactgatggggcgggatcgcgaagaggggtttggtcagctcccggatcccttcctggttgaagtcctccagattctgcgaagccagcagcatggcagattcctttttgcggacgcgcttgaggcagttgcggatatactcaataatcgtggtgcctacagctacattgtccgacagccagatatacagctcgtccagtgccgctactgtattgccctcagtcagcagtttgtcgctgaggtaggacaggacattgaagagcatggcgcttcgaacattcttactggcctgcaggagtcctttgacaccgaagaccacaaagcgggaggaggtcacattggtgtggccgttgaaaaacttgctctccgcccctttgcacatggagtggaggcccaacaaaatttcctgcagaatggcggcggtgtagagctgatacttcccttcatcaaaattcctgtactcctgctcaatgagcgcgtacaggtcagataggatgggataatcctccgggctcaggcggctgaagtcggtgctgtcgctgatgccccatctttcgtaaagcctgcccatcatgatttcgataacatcaatctggcggtcggtgaagctcttgtaggagcggaaaaagtcccgcagaaaactgatgtgctgggacagccgggtggactggcggaatgcggcgggggcgtccagatcctccgggctgccgccatcgtcccagcatttgggttccagcgggttgatccggtactggccgctcatcagatccaggaaacagccgcccaccgcttcgcacatatccttctgctcatgctctacatccaggctgatggcggatttcccggcctccagcagattgaggagcaggagcttcatcaggtagctttttccctggccggagttgcccagaatgaggatgttggctgaggtcttatcatcatcccgcttatcaaaatccacgatgacattggcgccgtatttatccttgccgatgtaaaagccctgggggtcggtcttgccgctgtagttgaatggatagaggttggccactgaggaggccggaagcactcgctcaaactgagagccgaaggcattgtggccgctgggcatgactgatacaaagccctgctgctggcggagcatgagccggtccacattcagcttagagcgcaccagttcagtgagtacctccgtttgcaggagcttgagctggtcatagctctgggcagtcagctccagatatacggcgcagtggaggagcggctcccggttccggtgcatggcggaaaccagagtgaccacatcctgcaggttgctctctgcagttaccgtctgctggagatcatcggtggaggaacggctcatccggtgcttgttggcggcgttgtggatgatgcgcttctcctcggccggggtcacctggcgggtgtagatacgcagggtgatgccatccttttctcccagatgccgcagaatggcctgctcatccgtggcggtaggatattcccgcagcgcccagacgcatcggtaagtgttcccgcacaggtaatggtccacattgaactgaatgaccgagggggacaccatatcaagaaaatccttgatcttcgcatccgcaggcatctgcgcgagataattctttctgctctttgccaaaattgtgatacctcctgtccggccggcaagaggtattcgtggcatgaaagatggcccggagatatctcctgacggccattttgtctggttaacggggtgctttagtcatcgaagatgacccagcgctccccgtcgtaatcctcatatttttcggtagtcgcattctgctccagatagacccccagcatcctcttacgctcctctgcgctggacagccgggtcttaaagccttggtcctccagatttttctggattcgagagaggtaggactggatgtccgaatccttctcgtttttaagccggacgatgacaaaaaactctctggcagttgccatttgcacctgcagccggtcaagccccatcatgtctctctccagcagtttgcggatgaccggaagctgctcctgctcccgaagctggcggtagtgtcgcttattatcctcaaaactctccttggaattgagggccagcatttcgatctccgccatccctttgaggacagtcatcagggcatagatccggctgccgatggattccggggagtggacggagaggttggtgggttctatactgaaaaacaccagctctccatgactggtgagtagtccatactccgtgatcttctggatgtcaatcagctcccggctggtctgccgctgctgtgcggcattcttcttttttctgttcattgttcattcacctcgcttcggtgtgtattccccagtcataggtctgctgccgcaggacgaaaaactggagcgcatatcggataaaatcaaggatgctggtatcctcaatgcggatagagagaaacgcataagccgccgtgaacacgattggcaggatgaggccgagttgggcaagggcgaacacagaaataaggcacccaatccccacaatgccgatgtcccgcagctcccacagccacagcatggccttggatttcagattatcagggtaaatatacaagctcacacctccaccaatcacatcataaccatagagaaaccagagaactcctcctccaaatcttcggtcaatggctcatcctcagagatctgctggccagcgcccacatcggaaagggcttcatctgtttcttcctgcgggatttccgcttcctgctccgcagcctgttggctttcccatccactcacttcctgctcgatcaagccaaggacaaagtccctctgagacatagagtcgtgggctgccagacagcccttcactcgttcaaagagctcaccgggaaccacaacagccaatgtgcgttccttttcaccctttccaacggtgttcaggccggaagagattccctctcctcgctcccatttggtcagggcattttcaagcaggcccactacaaatgccttttgagagaggggcttgtgggcctccagatactgtttgacccgctggaagagggcctccggcacctggaaggccagcgtcctgtcgcctccgcggacggcaggggcaggagcggcaaagtgtgcggtcaatacctgctccaaatacttgcccagagtcagtccaagggactcctgctctgtccgcaccttgttgtgcagttcctccgggatctgaccgcataggtttttgaatttttccatgatctccgatctccttttttgaatttacaatgcgggtggattgaagcagagagggactacggcctggaccagcggaaaatatggacagtccaggctttcatccgtaagcaattacttcttcaaaaaataggcgatcccccgcaggacaaagtctacacaagggatcgcaatggcgttatgtgaagctcaacataacagtgtttattaggacaaagccattatgttaatgatgggcacaaaaatggcatgaatacaaggcttcttgggattttactgcacataatactccacatttcaacctttaatcatagcagctaaaacctttaaagtaagggcttactttttccgcttgttcaagtagaattgtcattgtaataggagaaatttctacatgaagggcggtgggtatattgcccaacaagctaatcaaagacctcattgacaaaggtgcagtaactctaaaagaacagggatattccatacgcagtagcgaatacaccctattgacatggaagcaatttcaagagttctgcaataaaaagggatatgaaacatatttgccctcgcataaagatgaattcatcacagaactcggcaagtgcactccacctttaaggcagtccacaattgaccgcaaagccggaagcatgaaaatgcttgatctgcttgccaccaaaggtacctggggaaaggggatgctcaatcctctgcaagagttgttgccggaattcaactcctttcttgatgcgcaggaagaatatctcatcaaaaccggttattcagaatgcaccagagaaacgatgcgaaattatatctccgtagttatgcggtactttcagaatgctggtataacaaagctggaagagcttaacagctcacatgtgtcggcatatctgctgactctgagaggccatgcaaaaagtacagtgcgttgtgaactcagccgactgcggaagttcctgtcgtatctgtatctgcttggatatacatccgaaaatcttgcacctcatgtacctgaatatcgtctgggacaagcacagagcataattaaaatctgggagtcagaggaaatcaatgcagtattggaaaccgtgaacagagccagcccaaaaggaaaacgagactatgctttcattactattgccgctgaacttggtgtgcgaagcaaagatatctgcaatttgaagttgtccgatattgactggaagctttgttcaatctcctttgtgcaaagcaagacgggcaagccgaacacacttcctctcagcgaaaaagtgggatctgctattattgactacctgcatattcgtccgcaaacaaaatgcgaatacctgtttgtcagtttgaaccctccatatggcaagatgaaatcaatccattcagcgttccataggtatgtcgcgcgttcaggggtaaaagtgccaattcatgcgcatcacggcctgcattctcttcgggcaaccgttgcgacaaaactgctatctgccgatgtgtctccagatatcattttttcatttcttggccattcggaccgcgaatctctgggacattacatccgtctggatattgaaaacctgcgtgaatgcgccctgtcgtttgaggatggtgatctcttatgagcagaacttacgagtacagaagcggactggcaagtcaaataagtgcttttattgcagaaaagcgggcctgcggatgtaagtatgaaaaagaagccaaaacctttcaaacattggaccggtttctcgtagaacaaggaatcaatactccagtgttgccggaattggtcgttgagaaatggattgaaaagcggcccaatgaaaagcgtaaaaatcaaaaatggcggcttaatttcacaaaacgctttgccaaatatcttcaattgaatggctatgccgcgtactaccccgaacttaccatttcatctcgagatgatgctgacttttctccctgcatttttacgagcgatgagttggcacgtattatgaaatattttgaaacgatggttccaagcaggcaatgccctactgcgcaccttgtctttcctttgctgtttaagactctgatctgctgtggattacgtgccggagaggcaacccggctccgtgtaaaagatgtagatcttataaacggcgttttgcagatttgggaaacaaagcatgacaaaccaagatatgttcctctgtctaaaagtctgtgggcggactacgaacaatattttgaagaaatccatgcggaaagttctggtaacaactatttcttccccaatccccgaaaaagctgctaccatacaaccacagtctacaaccggtttcgggatgcgctatggcattgtggaattgcgcataaaggacgtggatacggtccgagggttcatgaccttcgtcatacctttgccgttcgttctatgcaaaagctgaaaaaatccaagagcgacatcgtgactacacttccatacctttcggcgtatctcggccattgcaacatgagtgcgacgcaaatctatctgcatttaacagcggaatgttaccctgaatttattcaaaagcagtgcgattatcttggcgatacgattccaacgtgggaggcgccgaatgaaaactgctgattttgccgcacatttgacggagtttctttcccattacctgcccgaacttaaaaatatcagtacgaacacgatttcatcatactgcgatgcatttcggctattccttggctattgccaggatgtagaggggatgaggattgaaaagctttccatagatgatctgacgccggaactcgttgaccattttttgcaatggctgaggatagagcgaaacaatggaaccgcgacgcgtagccaacgtcttgcagccatccgctcatttgttaaatacctgcagataaaagagccgcgccttttgctgaatttccagcaaatactggcaatcccagtgaaaagagctgagcgcaaagcgattaatccgttgacaaaagaggcgattgcgctgatcctgcgccagccggatacatccactctcagcggcagaagagatgccactatcctgtgttttctttatgatacagcagcccgtgtgcaggaaatctgtgacttatgtattgaagatgtccgtcttgattatcctgcaagtgtcaagatccttggtaaaggcagaaaaaccagggtagttcccattttgccggcaacggcgcagaacttgaaaaaatatcttactgaaatgcacatgcttgcaccggaaaaaagtcatctgccgctatttatgaaccgcaacgggcaaaagctaactcgtgcaggggttacgtacatcctgaacaaatatgccaaggccgcttcagtgattgatccttccataccggagaaaattcctccgcatttgatgcgccatactaaagcaatgcacatttacgacgcggataatgatctcgttcatgtgcgcgatttcctcggacattccgacattaaaactacagacatatatgcccgttcaagtcttacaatgaagcagaaagctctggaacgagtttcggattctccagttccctcaatgccttcctggcagaaaagtcggagtacaatggagtggttgaaaagttttgggtctcaaaaagcatagcacattatgtgaagcaactgcgccaggaatcctctcctggcgcagttttcacatctgttcttctcataacgaccatgattaaataaacactgttatgtgaagctcaacataacagtgtggccatcccctgcgtggaatacctcatgcagcgggtggctatggtcattacgcttgatttggaatgggatttttagttggctttggtaatagctttcgcgcttgctttcgggtatcttggctttaccattaaaaagatcggaggaactgctatggcagaaaaaacacgcaacctctgcgctgagatccccttggagctgcataccaaagtacggcagcgacaggcggaatccggcgagacactgagccggtacatgaccgcgctcatcaccaaattttatgaaatgcctacaaataaaatgtcaagtgctaattgaataatcccgatagctgcttagttgagtaaaagagcatgacaaaaaggccaccgtcatcaacgctggcctatggtgtggctcggaagagttattgtgtggtgtctaaagatttcaagtattctgtaacgcgaccgtagtaaacccgcagaaacttgttggctccagcagtcatgtagacaaagtatggtttgccttcagcacgtttcttgtccatgaaaagatatacgggatcgtccatcggttgtttcttaattaagcaatccataacgttgaatagtgctttgcgcaaagcaggagaaccacattttgaagaacgtacgctcttcaattccatgtttccggattggtttgcgccaggatcaacgcccgcaaatgctgacagcgatcccttgtgagcaaagcgagttacatcaccgatctctgctatgagttgaggcccaagccgttctccgacaccatacatcgacatgacgacaggatattccggtagttgggatgccagatgattcatctcgatgcggagcatttcgacgctcttcgaacaggcattcagttgctccactgcttgttggatgaggaatttcgacgtgggatttttgggcactgtaaccaagattttcttagccccttcataaatcgctgttgccgttttgttgctgaagttataaccgtggcgcttgcaccacttctgatacctttctgtaaaagcgattaagctgatgctgcatacgcagtctacatgccaaaaggatgcaacaaagtccacccatttctggcttccatcgtcacggactggactgtcaaaaagagtgtttgcgccgggataggtttggtcaagcagtgatatgagattgttttttaatgtagtcctattttttgaaaacaaaccatattgccgattcatagtctttaactgataacgaatggtgtccatagaagaatacgggcgtaagtcggcccagttgtcaagcccgtagcgagcaatctttctggaatccgctttgtccgttttgaccttacgaagggagttgtttccgtagtctttaatcaatttgggattgacggcacagacataaatccctgcatcgtggagtgcttgcgcaatcggttcatagtatcgcccagtgtgctccataactactcttgtttcaccctccaggcttttcagatagtttgccagctctctgagttcactgggggtgtgctgtacagtgaaaggcagagccactacttcgccaaaagggcgaagaacagaaaccatgctttttcccttggaaacatcaatgccggctaagttgttcatgcaatcactccttgttatgggttagcaatgtggcggggccacctttcctcattgccgattctatcagtctgataacacgaacgcttcggttctacctacacaaatcgaacgctgggaatgagaggcggctgactgacatttcaacggacgctaagtccttggaggacaccgtcaggccattgcgctctcattttaccagcttaggcaataagatggaaaagacgtggctggctgccacgcctctaaccaaatatatagtaactggaggaaaatgtgaagatggacaaggacaatgtgaggacggtggcgtttcaggtgcccaccgagctgtttgagcagctcaaggcatacctcaagcggaacggcatcaagcagaacgccttcttcctggactgtatccggcaggcgctggcggaggacaccggcactgccgaagaataagaaatacatcgtgcgaaccgctgctgaaaatttcggcagcggttttgctttggaggaacaaaatgtttatttaccccgaaaacctgaaagccaagcccatgctgtggctctggctgctgcgggacatcgccgtgattggcatcggcgctttgctctctgtgctggcgctgacccagggccttggcatgggactgctggtggtcacggtgctctacgccttcctcaccattcaggtggatggcagcagtattctggacttcctgcgccgtgccgcctgttttctcttcctgcggcagcaatattacgaatggaggctggacccatgaatcggaaacagaaaaaggaactgcgccagcgccaatccacccggcagctcatggggatcgtccgcgtgacgccccacggcatcgtgacagactctggagagcgggtcttcttcctgatccagccggacaacctctccgtcctgtccccggaggtcatccggggccgcgtccgctccctcactatgcttctgagcacccaaccaaccttggaaattctggctctggattcccgcgagtccttccagcggaacaaggagtattacctgctgcgcttggaggaggaaacggagcctgccgtgcgggagctgctggaacgggacatggcccatctggacgccattcagttctcctccgcctcctcccgcgaatttgtactggtgctcccactggatgaaaaggccggtgcggatgaaggtgcgctgcggcagttggagaaagccatctgtgaccacgggctccgcgtgcgtctggcggaggagcaggatgtgaagcgcctgctggcgatctactaccggcaggatctcaccacggaggtattccgtgatttcgatggagaggagtatatggcacatggctaaaaagaaacagaagaagaaaaagaagatgccggaacaggttcagcgcccgaaggactttctggatatgatcgcgcccgcggcggtgaagttcaacacagatcacttcatcctcggcagccgctatcacacggcaatggcgctgaaaagctacccgcccatgacggatgagctggcgctgctgcggggccttggcgatatgggcggcgtcaacctgcgcctgacggcgcggcaggtcacgcccgccgaggaggacgccatcctccatgccgccaccaacaaaagccgcatggagcggagcaacaccaacgactataagcaaagcgtcacggcggaggcaaacctgcgggatatggcggagctgctggcaaagcagcgacaggaaaaggagccgctcatccactgcggcgtttacttggatattgccgccacggatacggaaaagctgcgcgcggcgcgggacacggtatccgcacagttggtccgctcccgcatgggcgccgattcgctgctcctgcgccagcgggagggctttctctccgccaaccccgcgggcggcagccagcttgccaattttgcagaacgtgtcctgcctgccaggagcgttgccaatctgtaccccatgaactattccggcaaaaccgatcccaagggcttcttcattggtcgggaccgcttcggctccaacgtcatcgtggacttcgaccgccgtgcttctgacaagaccaacgccagcgccctcatcctcggcaataccggacagggcaaaagttaccttctgaagctcctgctctgcaatgtgcgggaggcgggcaaaagcgtcatttcattggactctgaacacgagatggaggacgagtgccgcgccctgggcggctgctttttggactacctcagtgggcggtaccgcatcaacctgctggagccccgctgctgggacgatggcagcgggccggaagacccggacgcgccggacgctttccgggggacgctgctctcccagcacatctccttcctgcgggatgtgttccgcgtctacaagggctttgacacgccccacatcgacacgttggagctgatggtagagcggctctatcaaaagtggaacattaccgaccgcacggactttgccggaatacagccgaccgattaccccatcctctccgacctgtacgatacgatccaggatgcctatgacaactatgacgccgccggtctttatccacgggagatgctgcgggatctgctgctggggctccattccatgtgccgcggcgcggatgcccggttcttcaatgggcataccaatattgaccgctccaaatttcttgttttctgcgtcaagggactggataacatggcggaaaacctgcggaacaccttgctgttcagtctgttgtcctatatgtcggatcagcttctgacgctgggcaattccgtagccgctatcgacgagctgtacctgtggctgtccgatcccaccgtcatcacctacatccgcaatgccctcaagcgggtgcggaaaaaggaatccgccctgttccttgccagccagaatttggaggacttcactcagccaggaatacgggagctgacacgccccctcttttccatccccgtccatcaatttatctttaacggcggcaatgtggataagaagttcttcatggataacctccaactggaggagtccgaatatgccctgatccgggacccgcagcgcggctcctgcctctacaagtgcggcaatgaacgctatctattgcaggtgcaggccccggagtacaagcaggctctcttcggaacggcaggtggacggtaatggcggtacccgtcgcggcactggcgaaaatcgccgctgcagctctctcggatgaggacacccggcgaaagctgggctggatcgtggcggcgatctgttcaccgttgatcctgacgctggcgctgatctgctctctgctctccggcagtgcggagcataacaattccgccgttctgctgtgcttcaacggcggaacgatcccagacaaaacgcctgcggaatatgttgcctacattgaagatatgcgccgcagcttcgcgctgctggacagcgccattgccaccatcaacgacatgatggagaacagcgacagccttgacggtatccgcgtcaaggctgttttctatgccattttctttggggaggacacccccagccgccgagcgcaccgacagtttgtggactgctttgtgacctacgaggaacgcacccgcaccgtcaccaatgaggatgggacggaaaccgaggagagctacaccgtggcgattcctgttgcggacatagccgccgtgtatggcaatcttgaaaacgtgcttcacttggaaatatccgcggaacagaagtccaacgccgacagtgtgtacaatctggcgcgctatggcgttgccggaggttcggaggactggatacctggcgcggatgtgccgtacattggcgtggacggtttctgctcccccattggctccggctgggagcgccgagtcacctctgaattcggaaaccgcgtcgatcccatcaccggaaagcacaagggacacggcggcatggacttggctgttcccaccggcacgcccatccgcgccgcgctgggcgggacggtaacagtctccaagtacaacactggcggctatggctactatgtcatgatcgaccacggcaatggccttgccacgctatacggccactgctccaagctgctggcaaaagtgggacagacggtggaggcgggagacatcatcgccctctccggcagcaccgggcgctccaccgggccacacctccacttcgagacgcgcgtcaacggggaacggacgaatccaagggcatatctgccgaaaggctgaaaggagaaaaatgattatgaaaactgcaataaaaccgatcacaccggagcgtgagcgggagctggtagagaagctcgtggatcttctcagcagccgctatgacgcagggaatctctatgacatcctgcgccatgggctcggcatggatcacagcgacatggaggcgctgggcttccagctccgcgactactacgaggaggttgagtaatatggcataccaaaaagtatccagaccgtccacagtctatcatttgacgcaaaaaggcaatctcgacagcattctggatgacggcgtgattcgccgcttcaacgatacggaatgttggttctgcgagagcctcgacaaaatgaaagcgtacatggagcagaccgtgatgtgcgaaggcaaaccgtactacgccgtaggcggtcagctctgccgctatcccaaattcgtgccggaggactatgttctcctcaagctcacgcccagccacgcaaaagataactggtaccgctgggatcaggagatccctcccggcagccccaaagaactggcgcgggcggcaagagaattctctctgctgaagatcggctaccgcggcgacatggcgttccgcaacgcggaggtcatcgatgtgccgctgtttcttacggatgggatcgtgcagggagagccggtgcagaccacatcggaactgcgggagctcctgtttgaacacgtcgagcgcgagcagagggaatacacagattctctctaccgcatgacgcagggacagcttatcgttaacgccggagagatcgaggcgaatcgtttttgctataacgccttgctgaccatgcgtttagaccgcgaacagttgaaagtgctggcggctatggataacccgctggaggcggtgcgcggcgcatgggcctcggcgcaggaggtgggtcaagaggaagaattctctcatacgctgtttgaaatctgtgagcagacggcgcaagaacagacgatgcggatgaaataaaagtggaggataccaactatgaaaaaagaaaatgtcacgatctcattcgagagcgagcagcttgccgctctcgaattttcacttaaaaagaagaacaccagcatacaggcgcagttggaggagctgctcaaatgcctctatgaatccgaggtgccggagccggtgcgggagtatctggacagccgtgcggcgcccgctgcccgtccccgccgtccggcaagaccggcgaagccgcagccgcgggaggagcctccttccgcgttggcgcagcccactgacgaaaggaatggtgagtgagatggcagatcatgtagacatcacgctgtggatcgaccggcgatggaaggatgccattgaaaagcatctcaaggatgaaaccttgcaggagcatctggaggatgtgctggatgagctgtgcaaccagctcccagaacgtgagtatgagcgcatcagtgccgagatctacgcggaggatgccgcacagcgtgcagaggaagaagcctcccgcacctatgctgcctaccatgtggtagagaacgggcaggagtggtacttcaagacctcccccggtgaggagctgctggataccgcggaaaagctgcgcggctatgtcaccggcgagagaggcactgcgccggagatgttcatcagaatgtttccgaacggacgtcccatcacagcggaggagtacaacgcgctcaccacccttcgcatggagaacaccggcaaggtgcgcggtgtgttcgatgtgaacttcgacaagcgggagttctccgccgtacacatcatggacggctggcggacctgggcgatgcgggatgtgtcagcggcggtgtaccatgccacccggtcgcaattcgcgtcgagcgatgataagtggcgcaagctgctggatcatttgagcggtaaagagatcacctcggcgggacatctctccgcgcgaaatttctctttcggtgatgagatcatcgaatcggacggcaagctcaatttttatgtgcagacggagttcgatgtggacgctgccttcggaaccttcgtcctcacgggcaaaaacgatgactggctcaacatctatgccaactacgacatcgcggaggatagaccctgcgacacgctggagctgacgctctgcaagggtgacggctccgaggagagctggagctaccagctcaacgccgcagagcaggatgtcctgctgcgcaagatggaggaatactgtcaacagcagaccggcatgagtctccacgactacgcgcagcaattccgcgaggaaccggaacagcagcaggggccggtgatgaagctgtaggtgcaaacgcaggcacagcaaggctgaagcactcacggctgcggaaacaacagcgtccaggctgcgcgtgcctgcgggcccgcggcgccgccgaactgcgtcaacccgcccttggcgggcagccacagtttggcggctgttattctgctcccgcggtttttctccgtcccgaatttgaaagcgttttgcgcagatttttgtgctttcaaatgcgccgcgcagggggctccccgtttccccgcaccgttcgccctgtgtgccgctgtgtgcgcgtttaagggctggggtggagtgtgtacccgccaaagcccattgaagcgagcgttgcggcgtttgtgggcgatgtgcgaaaaaaccgtgtggatacggcttcgacgatggagaaatgagcctttggggagggtgtttttcctcctgaccatgccctgttccagaggctttcgccccttatttacccgttcgattgtggaacaagataaagggccgcagtcgcaagcgcctgcggcccgcccacaaagccccgcagtgcggggcttttttgcgctttccaaagcgcagtctatttcagatcatttcagaaaaaccgcagtctggtttccaaaaaggcacggtgtttccggcattcgcgccccttttgaccgacggcaaggaaaggagaacaccgatggaagaaaaagtgaaaaagaaaacgacattctggctcccgcccgacatgatcgaccgtatggatggctggctgaaagcagataactgccgcagccgcaatgagttcgtagaaaaagccttgcgcttctacatgggttatcttagcacagaggataacaccgcctacatctcgcaagccatcctcactgccattcagggtacgctggacgacaataacaatcggctctgccgcattcttttcaagtgtgcagtagagcagaatatgatgagccacaccatcgccgcgcacttccgtaccgatcccattcacacgcgggagctgcgggcctacgccgtggatgaggtgaagcgcaccaacggtcaggtgagttttgagagcgcggtgcatcagcagcggcgaattgagccggaggaagaatggcccggatcgtactgatctcgccctacctcaagggcggacagaatgccgcgaagctggcgcagcgcacccgctacgttgccacccgtcccggcgtggaactgctggcggatgagcgcagtacactccccgctacaaaaaagcagcagaattttatcacacggctgctgaagtccttcccctcctgctgggagctcattgagtacgaggaatatctggatcaccccactcagggcagcgcctccgcgtttatccagcaggtgcaggaagactatatagaggcgctggatcaaaaggaaaatttcatcgactacatctcccaccgccccggcgtccagaaggacggcgagcacgggctgtgggatgccaacggtaaggtaaaaaatctcgcgcaggcggtacgggaggtggcggagcacaccggaaatgtgtggacgccggtgattgcgctgcgccgtgaggacgcggagcggcttggctacgacagcgcggaaaactggcaggctctggtgaacgcctccatctgcgatatcgcaaaggcgtataagatccgaccggaaaacctgcgttggtatgctgcgttccaccagaagccaaatcaggtgcatatccacatgatcatcttctccgaagatcccaaggagggctacctcaccaaagagggtatccgggaaatgaaatccgtcttcgccagacggatctaccacgcggatcggatgcacatctaccagcaaaaggataccgcgcggcaggagttgcaggcgcagacccgcaaggccatggtggaatgcatcgcacagttgggcagcggagcggtcgagaacccgcggctggagcagctcaccgaggagttagcagagcgtctgctgacgatcaagggccgaaaggtctacggctacctgccgccaaggatcaaggccatcgtggacgccatcgtggaggagctggcgaaggacgagcgggtgtccgccgcctatgaaacgtggcagacgctctacgagcaggtgtgcttggactacgatcagcggccgcgcaagcgtctgccgctctcccagcaaaaggagttccggagcgtccgcaatatggtcattcaggaaacactgcaatggatagcagagcggcagcggtacgcggatgtgcggagaacactttccacgcaggaaggacctatcatcaaaaaggatgccgcagaagccgcaccgaagaactctgaggtcacggcatctctcgcgtcggcgcagcccaaatctgaccgtgcggcgagcgccacatcggaagataccagctccgctgacgctgctacctccaaagatactgcgccgcccgtgggcgaagtaactccgacgcactcacagccatccggtcaagcagggcaaaccgcaccggcaggagcggagtaccatgcccccacggtgggcgaaactgttgtgcggatgctgcaccacatgagcaggatcttcgaggacaacagcaagatcgaccagatccaccgcggcttgcagatcgaccgcaagcgccgacaggaattgcagcgcaagcggctggcgatgggacacaagccggacgatcatgaagagcagacattcagatagcacaaagcagaattttgaaaggaaacatcatgagcaaatttatctatttcacgccggaggaaaaagcacgtgcgcagaacacggatctcgtgtcgctgctgcgcgcccagggcgagcgacctgtgcgctccggccgggagttccgtacgcccaatgatcccagcatcaccgtgcggggcaacaaatggtttgatcactccgcgcgcgtcggcggctacgccgtcagcttcgtccagcgctattaccgcctcccttatcaggaggcggttttgcttttgctgggcaggaaaaataacaaatcgtatgagcaggcaaagcccgcaaaggaggctccgaagcccttcgctctgccggaaccttacggaaccatgcgacgtatgtatgcctacctcatgcgtcagcgccacattgaccgcgaggttatttccgccttcgtacatgaaaagctgctctacgaggacaagcatcacaactgtgttttcgtggggctggatgacagcggtgaggccaagcacgcgcacatccgcagtaccaacagcgagggacgggtgttccgcatgaacatcgagagcagcgccagcgagcactgttttcataagaacggcacagacaagtccctctatgtgttcgaggcgcccatcgaccttctgtcccacattaccctctatccctacggctggcaggagcacagctacgttgcctgctgcgggctctccatccagccggtgctggagcggctgcggcagaatccgaagctggacatggtgtacctgtgcctcgacaacgatgacgcgggcaacgacgcctgcgaccgtatgacggatacgctggaggacatggacttggatgtggagcgtctctgcccggtgcgcaaggactggaatgacgatctctgcgccaaattcgagaggaaggagaaagacgcatgaacgaaaacatatggcccctgattttgcttggcggcggactgctggcatttttgcttgtcgtgtcctttctctccaagaattactcgctcaacaatttcaagagcaaaaccgttggcgacggtcagtacggcacagcccggtgggcaacgcccaaggagatccacacgacctatcatgtggtcccgttccgtccccgccgctggcgcaagggagaggagcttcccacggtacagggcatcattctcggcagcatgggcggcagaaagcgcagagataaaaaaggcgtgattttacaggccactcacaagctgctggagaggctccgccgtcctacagcagggaaaaaggaaaagcgaaagccaaagaaaaagcaatcggcgatttccaaaatcaaaaatgcgattgaaaatcagcaggatgtccgcgcactggtggacagcgatgacatccattgccttatgatcggcgcttccggcgtgggcaaaaccgcgtattttttatatgcaaatttggagtacgccagcgccagcggcatgagctatctggcgctggacaccaagggggatctggcgcggaactacggcgccatcgcctcccggtactacggctaccgggtttccgtcatcgacctgcggaatcccacccgctcggacggcttcaactttctgacgctgatgaatcactacatggatattgcgagagcagatccgtccaatttggcggcgcgggccaaggcggagaaatacgccaagatcctcgccaagactatcatcaacccggacggcgacgctgcccaatacggcgagaatgccttcttctatgacagcgccgaggggctcctgactgccattgtgctcctgctggcggagttcgccccgccaaaggatggggagccggagaagcggcacatcgtatccgccttcaaactggtgcaggatctgctggcggtgccgaagtcaagaggcaagaacggctttcagctgctcatggatgagctgccaccggagcataaggctcggtggctggcgggcgccgcactcaccagtgcggatcaatctatggcttcggtcatgtccaccgtcatgtcccgactcaacgcctttctggatacagaactggagcaggtcatctgctacgacagccccatcaatgcggaaatgttcgcctcggagaagtgcgccatctttctgattttaccggaagaagatccggcaaagaatttcatcgcggcgctcatgatccaaaatctgtcccgcgaattgttctccgtggcggatgaaaccggcggcaggctcaaaaaccgcgtggtgctgttttgcgatgaacttggtacaatgccaccctttgacattctgcccctattcagcgcgggacgctcccgcaggctgacgctggtacccattatccagagcctcgcccaactggagaagaactatggtaaagaaggcgcggaaattatatgtgacaactgccaggacaccatcttcggcggcttttcgccccagagtaaaacggcagatgccctctccgctgccctcggcagcaggaccgtgctgtccggctctgtcagtcagggaaaagagagcagtcagtccttgcagatgatggagcgtgcgctcatgacgccggatgaactgaaatccatccccaagggtgagtttgtagtgatgaaaacgggaacgcatcccatgcgcacgaagctgcgtctcttcctggattggggcatcacctttgacccggacggctatcgaatgccggagcgggcggcccggaagatcgcctacatagaccagggcgaactcgttcgcagcatccatcggagctgcacaaagagtccctataatatggagggtggaagatgagtcaattcaactttatttacgccgaggagcatctgagccaccgggagaaggcggtctatatctacctgcgggaccgggcggacgcctccggtgtctgctggcctgggatcaagaccatcgcccgagaattgggactttcgccgcggacagttcagcgggctctggcagatctggagcgcaggcagctcatcgagaagcagaaccgccaccgctccaacggcagcctcaccagcaatttataccggctgactaagcacaaaacgtcacagcctcccgccaaggggggactgtgacgttttccctttcaaaattctgtccatagggtagcgtcaccatggcgcatccagaagagcctactctaccggaggatacaggacagagaaagaacaagaatatggaggaacttatgaagactatcgttagaagaacagcgctggctgtctgcatccttgtcctggcattgatcctgcccacagccgcttccgccgcctgtgcaggctttgatgacgtgccggagtctgcggactgctatgaaagcgtgatatatctggcagaatgtgaaatcgctgccggaacaggaaatgactgcttctcaccggaacagctcatcactgtggagcaatgggctgtcatgctctgccgcgcctatggtgtggaaactatcggtgatagctggcaggatgtgggccgaagcagcgtcgcggaagcctaccggcagggctggctgaacgaaaccgcactctccgcaccgcgctcaccgatatgtcgcagcgtgctggttgagagtacttttgccgccgcggatgttccggtttatgacagcacgctctacgagggagagacatcgctcagcacggctgacaacatcctgcgcgtggggcgggagctcaggctgtgctctgatgatgcggataccaatgcgctcgtgacgcgcggagaagcggcaatcattcttcatgctgtcctgacacagagcttccacgtcgaggaaccgcctgcaccggtgacgctggtgaatgcggcaggtgtcaatgtcaacgatttcctgctggaactgcggaaagtacccgaacaggtcctcgatgccttcaacgccgccggctggacatattgcatcgacttcgactacatgggcggcctcagcaagaaactgaacatgagctgcattggagccaccaattacagccggaaaaccatctacatctcagaggccgatgcgacgctccacgagttcgggcattttctggattatgccctgggttttcccgcagagcatgaacggctgtatctggcagaatcgcagaactccagtctgcgggactatgccaagaccaatagccgggaattttttgccgattgcttcgtccactggatcacatacagcgctgacaaaaagcgcatggatgatttccgggatgcagcaccgcagacttacgcctacatgaagaaactggcaacaaacaactggggagcctgatacatacggttcgccacggggcgtcacagaaatggcagagtcccgcagttgacagattctcccttttcccgctataatgcagtcatactataaacgaaaaggagatttatttccatgaataaaaccgaactgaccgccgccatggcggaaaccagcggtctgagcaaaaaggactgcgaagcggccctcgccgcctttaccggcgcagtggaaaccgccatgaagagcggagacaaggtgcagatggtgggctttggcagcttcgaggtaaagaagcgccctgcccgtgtgggccgcaacccccgcaccggcgaacccatgacctaccccgcctgcaaggtgccggttttcaagcccggcaaggcactcaaggatgccattcggtaaagccacataacagcaagttcccccgtgtccttccaaccatatgagagggcgcgggggggttctttgggaaaagccgttggtaagcgcagacctcgtgtttcctgatggacggaaaccgcacagcatggtattctttcgataaggactgacgttttccaatacatttctgggcataccgggcaaccaccggtgaaaagcgattgcattgtaagggaaatccatgcaggcagaaagagcatgatcagtgctccggctaccgccgtatcaaacgcagataccggctcctatacgaaaggatgtcatatggcaaagaaaaagaacggccgcaatccacgcaatacgatggaaagtacagacaggaagctgattggcaatgcttttgatgacgccattcgctttgcgcggaaaaacagttcccatcccaatgcgcctaagatctatgatcttgtcggccctatcctgaagcgccgcaaggccgctgtttacaacctgctgccagaaatcagaaaacgattcgggcagctctatggaaattcggataccggcattttaacagcatggatcaatgaatgcagtgctctgaaccattctgttgacggggtggatcacctgtattacatcacgctggccgctgcgatctttatgctggatgagttgaaacatgacggaaggctccccgctgcgtaccgttattttaattcttctcaggaagcgctgatgtctgttcgactgccggatatttatgacccgtgtcacgaagagatcgtgctgcggggcatgatggagctgatccgggaacgtgacccgcgggacaatccatttcaaacctacatcaatgacgtgtctgcccagcgcacggaaccggtgatccaccagaagccggagcaggattccgaaagtctgtccccgcgggagcgttttaacgctgtcatggccttggtcccttccgttgtaaaggaacgggctatgaagcggttcatagagaagtattgggagtttctgggcatcttcttcgcctgtgacgctccgctgtgtaagaagcagaccgaattactgcgacaatcggattccatcatgcgcgagtgccgcaaactgcataagagactcgtggaaaaacgggaggaaaagaaatcgccaaacataccgcgctatgtattggctccgaaagccgcgcttcctttccaaaagctgcaggatataagcggaaactgcggaatgagcagagcggaaaccttcgccatagacgaaatggaccggctgcaggcgatggctgcgcagggcctcgctatggaggatgcggccgacgatgcagggcacagacggttctcactcgccctgttcgcacattccgcacagatggttaagcaagaagaccttatagaaaacctggacgccgacattgcggaatgccttttgcgttttgaagtcaacgacccgtatgaaacctgctttggctatctgtgcctcatagaagccggaagcgatatcccatggacctataatgccgctgttgccgttctgatggctgcggcacgcaagctgccatggaacgcacgcgcactcgatgaactggacgacctcacggatgggtttgatgaagaaagcgattcggaatacctgcatgagaacgcggatggggattttgcaagggataaagacatcgcgcccatcgactggaacgatcgaaaggcggacctatatcgactcagctatttgaatacgcccctctacacgcccttggaatcgcctgtgcctgactggaaattgaatatcccgcagatcctgtgtggccttacgggaatcgtaatgccgcgaacggtttccgacagcgacggaatggcagaggttttcgaggcagcaggcgtggagaaaggcactgcgaaggggttggagctatatcttcaaattgctctggacgtacagatgcaaagcagggactggcggcatgacttccgacatccctctgccgcacttccgaaaggactcagcgactctgatgccgaaaacgcagtcaacattgataaggaggatgacattgatgggctgaaagccaaaatcagacggctaagggaatccaatgagaaatacagggaagatctctaccagatccggcgcgaaatggaaacggttaaggagcacaccgcaaacgtggagaagcgggcggctgccgagaggacggaactcgctgaactccgggagctgattttcatgcaggccaatgccgttgaaatggggggaccggaacaggataaagcggcagaactgaaatttccttattccacgcgaaagagagtcgttgtcttcggcggccatgactcctggcgcaaggcgattcgcccgcttcttcccaatgtcacctttatcaaccgtgagcagagacccaacgcggatatgatcaaggcggcggatgtggtctggatccaacccaatgcgctctctcatcgcagcttttataagatcatcaatgtggttcgaaccaatcaggtgcagatccggtactttggctatgccagcgcaatgaaatgcgcggtgcaggtgctggaggatgatgcttccgatgggaagcgttgagccgacgcggatgctgtgttcagcaacatcccacctgctgaatcacgctttttatgagaacgctgaatggctgaaggtttcctatatcagatttcatgggatcacaagtgaaaagtgacacaaaagccttgaaaaaacggaattgacaacaaatgacaactacactacaataaaagtgagatcaggcttcggcatccgactataaatagcgcatacgaaatgcagttcttgtgaaatgtttcccagcttttgaaaataacatttttataaaagtgaggatcaggatatgaatcagacggtggcaaagctcattaacgagcagatcaacaaggaattctattcggcgtacctttatctggacttcgccaactactatgcgcaggtgggtctggacggatttgaaaactggtataaggtgcaggcgcaggaggagcgcgaccacgcgctgctgttctatcagtatatgcaaaacaacaacgaggcggtcaccttcgaggcggtggccaagccggagtgggagcgcggggatcacatgactccgctgaaaaaggcgctggagcatgagaagtatgtcacggccagcatcgacgcgatctacgccgccgcctacgaggttcgggacttccgcactatgcagacactggactggttcatcaaggagcagggcgaggaggagaagaacgcctctgacctcatcaccaaaatggagcttttcggcggggacagtaaggggctctatatgctcaacagcgagctgaaagcgagaacctatgccgcgcccacgctggtgctggactaaaatcaacggacgaagaaaggagatcaccatgaaacagagattttttatttgtaagcattgcggaaacctcatcgccatggtgaaggacacgggtgtgcccgtggtctgctgcggcgagaagatgcacgagctaatccctggcaccaccgacgcttcggtggaaaagcatgtccccgtctataccgtcgaggggagcaccgttcatgtcaaggtgggcgaggcggagcatcccatgctgccggagcactacatcgaatggatatccatccagacgaagcagggcaaccagcgcaaggagctgcatcccggcgagaagccggaagcctgcttcgccctgtgcaagggagacgaggtggaggcggcctatgcctactgcaacctccacagtctctggaaaaaataacagccatattgaaagaaagcccttacatataagagcagaaagatgcccttgttttcagaacggaccgatcaaaaacagcgaatggtgaccggcctgcaatgagtaatccatttcaccgcaaataatcattgagccgtgcagcgccgttcgctctgcctgagaacaggcagagttcgtaggggctgtgcggctttttgtatcaacgcaagggcagggaaaaagcgcggggagcacccttgccaatattgcttccgccggggacaacgatattgcaaatgcaacagttgtttttacagagttctgatatactactattaaataacggcaaggccaaatacgacaggaggacaacgccatgatcgacaagaaagcttaccaaaagatggactacgcgctgtgcctgctcagtgcccacgctgacggaaaagacagcggctgcatcatcaattcattccatcaggtgaccagcagcttccctgcaaagtttaccattgccgtcaatcgcgagaatgtgaccgccgcagcggtcgagcaggcgggcagcttctgcgtaacgctgctcgcccacgatgcgcccacggcgctcatcaacgatttcggctaccgctccggccgtgtcgcggataagttttccccatacgaggtcagacgcgatgaggtcggaaacccctaccttaccgacagtatgctctcccgggtatcctgccgtgtaattgaccggctggagatcggaagctacacgctctatgtcgggcaggcgacggaggcagaggtgttcggcagcggcgaggtgctgacgctcaacgcctacgccgcgcggggcaaggctgtaccacccaccgctacggtgtaccgcgaaatggtcggcggcggcttcaaatgcagtgtctgcgggtacatccacgagagcgaaacattacgcgatgacttcatctgtcctatctgccgcgccacggcggacaagttcgtccgacagaaataagtatttggaaccgcattgtgaaagagaaaggagtgttttatgaattacatcgccatgattcaaaaccgcagatccgtgcgggccttccgcagtaaagaggtgtcggacgcaacgcttgccgagctgcgcacgcactatgaaagaaactgcagccgtctgattccggagcttgcaacagagcttgtaattcttgatgcggacgcgcagagcgcactcgagggcgcggccgggtaccagcagttcctcatcggcgcgccgcactatctgatgctcctcagcgccccgcatatccatgcggaggaaaacgcgggctacatgatggaggagctggtgctcaaactcaccgagcttgacatcgacagctgctggctgactttcactgacagcgcacgtatcaaaaccgcccttggactgaccacaccgctggaggtcgccgccatcgtcgcctttggctatggggaaaagacgcagaaaaaactgcggctgaatattctgaatatgtcaacggtcgatgtgaccgtcgagcagcagtactttgcaccgaaaaagggtatcagggaactggtcaatgtagatacctggggcaataaggaggggcttgacgagatgctgggcttctacgatgatatgctctggcaggcgttttacgccgtatcccttgcaccgagctatctcaaccgtcagccctacggctttctggtaagagatcatgagattatcttcgtgcagatatccgacccctataccgacggcacggatgccggtctcgacgccggcattgccctgctgcacttcgcggcggtcgccgctcagctgcttggtaagggacgctgggaactggatccggagggagtcgagggtattccagagagcggccgtgcattggcacgctattggatgtaactgtaatgagggtaaaagaaaggctggccgcagcgcaatgacatcaggcataaatagcaggagaacatcccaacacgcacatccagatcatccctacaggcactatgaatgttaagcgaggaggaatgatgatgagttccatgcgtatcaaatccagagaaaatccaaatctggagatctctgcgtttcgcggacattttgcgacccgccactcccacaacagccactaccttgacataacccgcatgaagcatgagtacggcatggcggctgatgcggccggtatccttgtgcagcactacatctatgagaagcagatcgacacgatcgtctgtatggacggcagcgaggtcatcggcacgttcctcgcagggaggcttgccaagaacgaccgctttgccgtgaactccggcaggaacgtctgcatcgtcacgcccgaatatgactccaacggccagctcatcttccgcgacaatctggcgggcatggtttccggtaaaaacgtgctgcttctgatctccactgtaaactccggtaaaacggcgcgccgtgcgatggagtgcattgagtattacggcggaagcctgcaggggatcgccgcagtattcagcgcgattgcaaaggtggacgaggtgccggtgatgagcatcttctcccccgaggacatccccggctatatgacaagccttgtgcctgattgcccgctgtgcagagctggacagaaaatcgacgcgctggccaacagctatggcttttccgttctgaaatgtaatgacaatatgaaataacctgcggacttgcagctcatccattgtatatgttttagggaagaatcagcccaaaactagagaggagtgcagaatgaggcggattatcactgtgggtcgtgaattcggcagcggaggacgggagataggacgaagaatcgcagaagaactgcaaattgcttactacgatcaggaaattattacggaaatcgcaaaaagaacagcgctgtccgaagcatatatccggcagatagaggagaaacgtcctgttgtgagtttcccaattcacgttggacacagtttttatctgagcccagatcctacgttccatccggatttgtccatctacacgaagcagcatgatttgcttcacgaacttgcgcgaaagagtgattgcgttatcgttggccgctgtgcggactttatcctccgagatcagaagcccattcgtattttctcttatgcagatatgccgagtaaaatcaagcgctgcatagaccgccggccagtagacgagaacctgagcgaggctcagatgaaaaaacggattatggaaatcgaccggagccgcgcacagtattattccttcttcactgagcagaagtggggagcgaaggaaaactttgacctgctggcaaacacatccggcactgacattaaaaagatgtctgaatccttatgtagttacattagggcttccgcctatgcggagctgcccccgatcgcggacggctactggaaaatgcgctcttgaatttaattatctctattcaagagaaaaacaaaaagtaagactttctaaagcacaattcatgctaacgcttgcagacggagttccggtacgaggaagacacggagtattccgagccgatggcaaactgggtagagtttgaagtaaaaatgaatctgccgtataaggaggcacagccctccgacccaatcaccataccggagcttcaggtgaatgccatgtctggggcaatgggtgaaacagatgaaatcacggcttccccctgcgcctactactggcaggccccggaaccgaatgaggatggaaccatgagctccatcattggatgcgggcctgcgatcggcgaagagacttctctgccggagatcacggcagccgccgagggactgatttcccacagaaagtcaaacgaaatctggttatatttcgaggtgcagccggatacagtgcggatacaatgcgtcccccaaaacggcggtgaggttgagacaatcacagacattcttccgtatgacggaggatgtgcgttcgatctgaaaagcggcagctttgtttaccgtgtgattgcagaatggggcgatggcaaccgtgtggaatatggcttcatcgggaagtggttgtgatcctgcggcaatcagaataaaggactgactatgataaagatactattggtagaagacgataaaattatcgttgcgagcctgagcgaatatctgaacagtgaagggtatcttgtgcgaagtgtatccgggcagacggcggccatgaagctgcttgcggaggaaaaggtggatcttgtgctgttggatgtgtctctggcggagggcaatggcttcgcggcgtgcagagcgatcaaatcggaatttgacttgcccgttattttccttaccgcgtcaggcgacgagttcagcaccgttacgggcttcgatctgggcgccgacgattacattccaaagccgtttcgcccgcgagagcttatctcccgcatccgaaatgtgctccgactcaccggcagcatgggcaaaacggtgaagctcggtgatgtggtggtggacaccgaaaagggcacggcgatgaagaacagcagggatctgttcctctcagcactggaataccgccttctgctgtttttcatcaacaatcggggaatcgtgcttacccgtgagcggcttcttgacgccatctgggatgttgccggcgagtatgtcaatgacaatacgctgacggtgtacatcaagcggctgcgggagaagattgaggatgaccctgccgacccgaagatcattctgacggttcgcgggacaggatataaggtggacgcatgatcaagctgctgaaaaacaaagaggtgcgaaaggcactgctgtggcagctgctgctctccgcagccgcctgcgccgtctgctttttcttcgacattcacgccggactgacagccgcagggctttctctgctcctcatgctgatctactgcgtcagtacatacaggaggtatcaaagcattgccgctttggcaggcgatatcaatcagatcctgcacggcgatcatgcaatcgattttgacagctattcggagggcgagctgagcatcctccacagtgagatctataagatgaccatacgcctgcgtgaacagcagcaaacgctgacaagggaaaaggcgtatcttgccgactccatcgcagatatctctcaccagatccgcacgcccctgacctctatcaatctgctgattggactgctgtcggagccgaagctgaccgacgcgcgcaggcagcagctgatccatgagctctacgaactgctctcccgcatcgactggctgatcaccacgctgctgaagatctcacggctggacgccggcacggtgcagttcaagcaggagcaggtcagtctggaggaactgctcaaaaagtcctgtgtgaccctgctcattcccatggagctgcgcgggcaggagctgctcatccatgcggacggagctttccatggagatttctcatggacctgcgaggccatcggcaatattgtgaagaactgcatggaacacacccccgagggcggcaggattgagatcgaggcaaccgaaaacgccctgttttccgaaattataattaaagacaacggcacgggcatttctccggaggatctgccccacatctttgagcgcttctataagggcaaggattccgacggcaaaagctttgggatcgggcttgccttatcacgcatgatcataaccggtcagggaggaacagtaaaggcagagaaccgcaagcccgtaggagccatgttcaccatccgcttttataagggaaccgtctgaccggcggctcccttttttactaagtgacggatccgtcacctgaaagtcaccgccgtgtcaccttgacaaaatagaatgggggtgtaaaaagcgaaaggagtatcccgatatggagattttgagagtggaaaacctgacaaaggtatatggcaagggcgagaacgaggtgcgggcactggacggtgtttccttttcggtggagaagggagagtttgtcgccgtgatcggcccctccggctcgggcaaatccacattgcttcacatcctcggcggcgtagaccggcctacaggcggcaaggtatttatggacggcaaggatgtgtatgcgcagaacgaggaacagcttgccatcttccgccgccgtcaggtgggactgatctatcagttttacaatctcattccggtgctcaatgtaacggaaaacatcactctccctgtcctgatggacgggcagaaggtcaatcaaaatcgactggctgagctgatgaccactctgaagcttaccggccgggagaaccacctgccgaaccaactctccggcggccagcagcagcgggtgtccatcggtcgggctctgatgaatgcgcctgcggtggtgcttgccgacgagcccaccggaaatcttgactccaaaagcagccgggagatcgtggagctgctgaaggtttccaacgaaaaatacgggcagacccttattgtcatcacccacgatgagagcatcgcactgcaggcggatcgaatcctttccattgaggacgggaaaatcaccagagacgaggtgatccgcagatgaatgttttcaacaaggtaaccttagagagcctgaagaaaaacaggacgagaaccatcgtcacgatcatcggcattatgctctcggcggcgatgatctgtgcgtccacgacccttgtctccagtatgcagaatttcgtgctgcgttgtgcgatccacatcgacggggactggtacggagcggtttatgacgccgcatataaggactatgaggacatccgcgattccgacagggtttcctccgcagcctacgcgcaggttctgggttacgcgaagatcgacagcgccaacgagcgcaagccctatctgtatgtgcttggcggcgatgtggcctccggctattttaagacaatgccggtgcatctcattttaggtacgctgccgaaggactccacggaaattattctgccggagcacctgacatcaaacggcaaggtgaattataagctcggcgacaccgtcacgcttgatgtgggtgacaggacacttgacggccggaggctgggacaggacacgcccgtatacgcctatgacagcgaaacgcaggtggagattatgagcggcgaaaggctcgaaaacaccgaaccaagaacctatacggtggtcggcatctatgaaaggcctacctttgaggactattccgcgcccgggtacacagcgcttacggcagcggacaccaaatccgccgatcaggctccgattcattgttatttcaagctgcacaagcccgccggggtgtatgacttcatgaaggaaatgggctatacgcaagagtatcgctatgcctacaatacaaaggtcctgctgtattccggcacggctccgttcgattccttccttaccgcgttttacagtcttgccgccatcatcatcgcgctgatcgtgttcggctctgtatcgcttatctataacgcattctccatctccgtctcggagcggacaaggcaattcggcctgctgtcctcggtgggcgccaccagaaagcagcttcgaagaatggtgctgtttgaggcgctggcggtcagcattgtcggcatcccgctgggcattctggtgggcatcggcggtatcggcataacgctgcttctgatcggagataaatttatctccattgtccgtgtggacattcccatgcggctctgtgtttcgtggcaggctgtcgtcattgctgcggtcattgcacttgtcacggttctgatctcggcatggattccctcaaaaagggcaaccagagtttccgccgtggaggcgatccgccagagcatggacatcaaggtaagcggcagacccgtccgaacctcaaagctcgcctacaagctgttcggactccccggcgtccttgccggcaagcactataagcgcaaccggaaaaaatacagaaccaccgtcgtcagtctctttatgagcatcgtcctctttgtttcggcggcggccttcaccgactacatgatggaatccgccgagggagggctggcctccgatcaattcgacctgatctacgcggcggagtcggacgcttccgccgccatgacgccagatgcgcttctggagctgcttttctccgagccgaatgtcaccggaggtacctataccaagaaacagtttttgcagggcgatatctcccgcgaatatgtcacggcaatgtttgccggccgttttgccgacctcggcatggagcgtgaggacgcagcgccgaaggatcttggcatctccggttatctgtactttgttgcggacaccgagttcaacaggttactggaaaagtacaacctgaaggaagcggattactatgaccgggacaaccccctgggcatcgcgcttgaccgtaatattgagtttgaccgccggcttgagaagtatgtcacgctggactcgctccagggcgatgggtgcgtgattgagggcctttactatgtagagatcgacggatattacagaaaagacagccggatcgatgagaacggcaataaggtcgtcctctatcaaaacagagacaacgagaacgacatcatcgagctgccctatgaggaatcctttgcaaagtacacgctgcggtccgaaaaaaccattgaggaggctccgttctttgtcagccgcagcacgccggtggccatcaatatgatctatccgcacagcatgctggagagcgtgattcccgaggcggcgctgaatcaattccgtaatacagagtatttcctcacatcgagcaatcacgccgcgagctttgaaaatctggcgaccatgctgacggaaaacggtctcagcagccggcagctcttcgactacgccgcaaacgccgagacaaaccggaatgtcataaccattatccgggtatttgcctacggctttatcgtgctgatctccctgattgccgcggccaatgtgttcaatacgatttccacgaatatcagcctgcgccgccgtgagtttgccatgctgaaatcggtgggcatgacgcagaagggctttcgcaggatgatgaactgcgagtgcccgctgtacggctccaaggcactgcttcttggtttgccggtgtcctgcggcattacatatctcatctaccgcgcagtcacaacggcctatgaaacctccttccatctgccgtgggcggccatcggcatcgccgtactgagcgtatttctggtcgtattcgccaccatgatatacgcaatgaggaaagcgaaaaaggacaatcccatcgacgccttgaaaaacgagaatctgtaaggaggaaaagaatatgcacaacaatgaagcaaccgcacatgggaaactcaacttgaaatccctgccgatctgctggctgatcattctcggcggataccttttgatccgtatggtctttcttgtattcgggctgcagctgcacctgaccgctcagggcatctgccttgcgctgctgccgtactgctttggggcgctgtatctatggaggtgctgcaagaatcgggaaccgctgttttacgcgcttggtattctgctcccggctattgtcgagaagctgacgctgtatttcctcggagcgtatctatgcggggtcagtccgttccgtgtcacggcagtcatggaggcaattggaacgattgagccgtatgcggtgctctttacacggatgcccatgcggtatgcagtcaatctgctgttctttaactggatatacattctttgcggcatcgccttctctgcactctgctttttgggcttgtctctctttcaaaagcgggtgggggatgaaccataggcaagatataggggcggcaaaatgttatcagggcaatatgcgacctcttgctgtcacagtgtttgcgagtaagttaagaaggagttgttgatgcgtcccttggtgtcaccctcgccaaaggccagaggagtaccggcgatgatacgccgcccggtggccagagtcagaagcgaagcagaatagtccgcacgaacatcgccgccgactttgtggattacggcttcgtcgcagctcatttccatatccttgcttgccagtataaacgctgcccagacaagagggttgaaccaatgaatggccaaagcaaaaaacgccagtgctttcataacatggtcgagtcgtttgatgtggtgctgctcatggaggatgatatactcctgctccttgtcgctcaaattgcagggtagatagattttcggacggaacaggccgaccacaaagggagacttgatatcgtctgcgatgaatatattgtctcgaagaggaacaaccaccgacagtttacgccgcagccggatgtaggagacaatactgtagattaccatgaccaacacgccaatcatccaaacataggtagcaatggacattggagcttcgagcgggtcggcaaccaactgttcccgtccttgcggtaatgcctcgttgatcgcatcactgatgcccggaacaggccgcgcaacagagggatactctgtgtgaacaatgttgctcggcacatattcgatgacgctggtaattgttccagactcttgggctggggcatcgaaaagattgtaaacggaaaagcttgaaccaatcgacaccggacacaggagacgaaacaggaccacgccccacagcgcataggaaatgaccttgggtgcttttttcagaagaaggcgcagcaggattacaaatacaatagccacgcttgccgtcaggctcatgttgaatagcttgggcatgaatgtataaaagaacatagggtcacctcctcattccatcaatgaccttctgcagctcgtcgatctcctggtcagtgagttttttccgtgtcccgaatgcagcgaggaacgcaggcagagaaccaccaaaggtttcctccacatactgctcactatgtcgggcgtagtattcctcccgtgagatcagcgaagtaacagtgccatcttcattcttaaacaagccacgctcacacaggcgtcgcaaaacagtgtgagaagtgcttttcttccagttaaattcttctgcgccgatcttggccatttgaccggatgtgatcggctcccgttcccagataatatcggcaaaccgggcctcggcagttcccattttcaaatcagacattaaagcgcacctccgtgttacagcttgtagcgccacttatatactacagcttgtaacacgaaaagtcaatatggcagagccaatgttcataaaagcttcaaaagtgaaagtgcgccggttgtccgacgcactttcttgtttctcatacctttgattgcagtcgcttcctgcggctcggcagttccttgttatgcagccagtagatcaagacgaacagcagataggctcccagacatactgcgaatatgtaaatgggtgtgttgacataccaaccgaaccattcggagaactgtttgaacacaatgatgggagaattaccagggccaacgaagaacatattcatatctctgccgattccaaactgcacgatgcagttcagggcaagggccacgccgcagagaagggtgaagatccaagtcgcagaagcatagtcgctcttctggttgccgcctcgcttggacacgcagaggaacagtcccacaaacaccaacagcatgtgccacacgcaagagtgggcggtaaggaacaggtggccatgaagcaggccggacggctcggtaaaggcaatggctcctcccaagagattatacagcaccatgaagctatgcaatgcccgacgcagttttcccagcttcaaccaaggaacaatcaggcacagatacattgggatgctgcacaactggaatgggaactcgccccagtgataggtgccgtccgcgatcacatagtagcagaagaattgcttaaatacttccgacagcgtcaataccaaaccgcaggcaaacaggatatgacatgctgttttgtcgctgacattccgcagcttccatgccgagaaaccgcagacagcaaagccaatcagggtaaacagaatatgtaatgcaccgtaggccggtggcggctccatgggccaggaaatagattcaaaaaaggttgctaacatttgctttgggacatcttctttctttggaaacgcacgggtgtggattgcttctttttagctgatggtcgggaaccgcagaaccaccttaaacagatcgccgtcagtagtcagctccatggtgccgttttgcagttcggtcaggctctttgcaatagacaggcccagaccgttgccttcgctctttctggagttgtcgccctgaacgaagcgctccagcagctcgtcagtagacaggttgaggggttcgcgggagatattcttaaaggagatgattgcctctccgtttttctcctccagcgtcagataaacgcgggtggagcgctgggcatacttgcagacattgttcatcaggttatcgaacacgcgccacaggcggcgaccgtctgccataattttaataggctgctccggctggctggtgaacagaaccaaatccttctcttgaagcttctgctcatactcaccggcagtctgtgtcagcatcacaccaacttcacagggagccagcagcacctccagattacccgtggacgccttagaagcctccacgagatcgtcaatgagccgcttcaggcggtcggactgacgatggagtacaccggcatattctgtaatggtggggttgtcgcactgctctttttcaatcagatccgcgtagttgatgatagaagtcagcggagtcttgatgtcgtgagaaacattggtgatcagctcagtcttcatgcgttcacttttcagacgttgttccaccgccgctgtcatgccaacgccaatgctgttcagattctcgccgtggcgcttgaaatcccagaacattctcttggtgtccacctgatatccaagatcaccggtggcaagagccttgccacctgcctggagctttcggagcatcaacgccacatagagaaccagcgggacaagcacaaggtgcttcacgaaccagaaggtcagcagaacatcctcctcacagtatgccccagcaatgacaaggacttcgatcaaggcgattgcagccaggccaagagcggtcttccaaaccagaggaatgcctctgcaaagggataccataccgcggaaacacacacatacgccgctccaaatcttacgcagcacgaccagtgcaattttaagggcatagaagatgatggtgttcttccaccagcaccccagcttgatccgcgttgcaaagctcatgcaccagccaagacaaatggccattagagagatacctaatgcgatgccggctaacgctgcttcgatgtctgaggcatagtagattgcttccaccatgacctgtattatcaggaacccggcaagcgcagtcatcccggtcagcaggtcaaaggggatcttcgtaccccatcccggctgcgctgttgccagaccatttttcttaccagatgcgcacataaggaaaacgaaagcagcgatagcaagaatggcagcgccgatgccaatcgcatatacccagaaacgcatggcaaaggccaaggagatcaaaaggtcggcataataataagtatcaggctgggtcaattcatccgcaagacgaatcgttgcctccaccgtaccgatctgctccacatcatatccgtagttgctatacagactgtaccagttttctacgccgtctttctccttcatatgataccagaccgcactgtactccgtggagctttccttcacgcccccatcatacccccagttatttcgcggaccttctgagaaaaccatttcaatagatgcaatgttgcgatctgacaaatagcgcatggcatcatcagcaccagcatctaaattctcgttggtcaaataatgaatgagcgtccggatatcgccttcggcaatatttctcatggcttcgtttttgtaagcccattcagatgtcgtatagagttcttcttccaccatgatgaacgcaccagctgcagagccgataacaacaatcaccatgatgatgaccagcaggaacgctacgaacttggctgatgtacggtgggtcagcgggagttttctattaactggagcaacattctccggttctggtgtcaccgcttcatactgcgcatcctgtacggtctgcgcgatttcctccacgatgggatctgcgtttttcttcctaaagaacggcttcatcgttttgctcctttctccattttatacccttgtccccagaccaccttcagatatcgggggtctgcggggttgatctctattttttcacggagatgccggatatgtacggcaacggtattgtcgcttcccaggggagcctctttccatacctgccgatagatctccttgggggaatacaccttgccgggactctccatgagcagtttgaggatgtcgtattcgatgggcgtcaaggaaatgggttctccgtccaaggcgacttccttggagctgtcatccagttccacgccgccgatgacatatcgtgccggagccgcagctctgctgcccaactgcatatagcggcgcagttgagaacggacacgggccgtcacctctacgggattaaacggttttgtgatgtaatcgtccgctccggtgttcaggccgaggatcttgtcggtatcctcacttttggccgtcagcagtataatggggacattgctcttctcccgaatctttaccattgcggagatgccgtccatttcaggcatcatgatatcaagcagaatcaggtgaatgtcctcctgctccataacctcaagggcctgcactccggtgttggcctcgaacagtttgaagtccggattcatcagatatattttcaatgcgttgacgatatcctgctcgtcatcgcaaatcagaatgtggtacatggaacccctcctttgatggctttataataacaatctttacattaagatggtagtggtagaaagatgaagaatttgtgaagattgccattccaaaagaacagcgcagctcccgaccggaagctgcgctgttgatgtggttgcttactcgtcaatcatttggagcagaagccagattgcaggctggttttctttaatccattccatatcgtgctgttcgctgatccgaatggcacccgctttccattcatcgaagtattcctggccagtttcagcgtagagtcggagctgtgcttccggcgcaagatcatcgagaacgcttcgcatcagatgtccacgcagtcctgtctgaccaccctctaaaaactgtgagaatacatactgcaatgtatagcttccgtagtaggtaagctcccgatactcaatcgggtgtgcgtcaatgtagtcggcaggtctggaagatgtggccggagaggactcaattacctcaaaaagatgttccaccgcagaataggtatcaactccgccgtaacggacggcctgatcgtagcactcctgcttctgggcgaggatatacttctgagtatccagggcttcgtcctcaatttcgtcagggaacttatcccgaatatcctgaacatagtaggagccgtcccgcggtgtccaatactccttcagaacatatttcccatctacaacttcaaaggtgatggcaacagcgatatgactgccggcagcatcgtgaaagcttccaccggaataaccaaatccctgatgaagcgccagtccgtagacagtgaccagcttgatgtggtcggaggaaccaactgcgggggtgccactgagttcctgttgatccaacaagacaaagctggcgcaatgatacagaccatccggcttggaaggcttgttttctgccaggattgcttcattgatcgccttcgccaacaacacttctgaatgatccgcaccaatgaactccgtcacgccgccgtcccgaatgtcgatgcgtgtatcgaggtcatccgccaaagctagatagatatacatagggtcactatccggacttccaccgccaatccatagctcatacatttcattgatcacatagacacggatatataggccagagccggtttcaatataatcgtaattttcaaaatccgaccacgataaatcgtatccgtattgtgaaagaataattacatcatctaaggtgagtttcgtcgcttcggcaacaactctgatgctgtaaacttctttcaaccgagctggataagtttccagtatctcaccgctatatgagacttcaataatgtctccgatttgcggctccagagcggggtccatattcatcagaggaacttcaatttggtcagcgctattgagtgcccagcttgcctctggtgcaaccagaaaatatccctcgtggatttcaaggacttccgctttgaaagtaatatgattgggcgcactttcgtcagaaatacgaatttccacattttcgacttccacataaacaacgatgtcttcgtccgttgggttttgcatattgatgccaaccttgaaccattcatcttttacggcgtcaaattcaacgggcattccatgtgtaagataggtagccgtatatccggtttctgttgtttcgtcgactggaaataaaagaacttccgtatcatccagtccttcaccggaccatatgacaatggagtttcccgttgtactgacttcttcatctgaatacacaaaatcatcctggcttcctgctggaacgacaattcgcagcgtatagctgtcctgatccggatcagtcaggaagcacaccgcaacgaccacgcaggcgataactgccagaacgacgatccagaaagcaggcttcttgtagttcatcacagacttcacacgctcctttacaccgacctcaccaaaggcaagagggcaggctgcgatcacacggcggttgacactacaggccacaagcgcctgggtatagtcggctctctgctcgttgcccagtaccttaatgaccttctcatcacaggccagctcaatgtcccggcacagcagcacataggccagccacatcagaggattgaaccaatggatcgtcagcagtaggaagccgaggggtttccaccagtggtctcttcgacgaatgtgtgcctgctcatgtgcgaccacatggttcagatcctgtccgcccatattgtagggaagatagatcttcggtctgaacacgcccagcacaaagggagaagccacattctcgctctggaagatgttgtctcggaggatgactgcctcgctgactttgcggcgcagacgccaatagctgaccacggtatataggaggagcgcagcgataccggcaatccagagaatgctaaaaatcggaatccagatctgaagcggatttgcgctcgtcaatacatcctgcggtggagcgaacgaggacagcatagggttgaccatgctattgatcactggaacaccgctgttgatcgtgggctgtactgccatttcgatatccatcggaactgtctctgcgctggggatcagactcagagcgctctcgatagagaacggaaaagccagacgcactgccacaatgccccagagcaggacattgacccacttgggtgctttcttcaagacaaaccggagcagcagcacagccaggacaagccagcttgctgatatgctcatgtttataattttcaaaaacaggtcgttcattatttgcctcctctccggatgcggtcgatcatgcgctgtacctcatcaagctcctcctcagaaatattctgatgcttggtgaaagcagcgacaaaagcaggcagtgagccttcaaatgtcttttcaaccagttctccaatttcatatgcctgcacagcgtccttggaaaccagagaagtaatggtgccgttatcgttctgcagaacacctttctctcccagacgcttgataacggtataggtagtggtgcgtttccaacccaactgctcctgacacagctttaccaactccgcagccgtgaccggctcatgttcccacataatcagacaaaaacgatattcgccctcgtgaatcttcggaatatccataagtcaacctccttgtctaccgatgtagacttcttgattatagtctacagcagtagacgcaaaaagtcaatggagttcatattatctttacaaataaatgctattggggagcagatggcacattgacgaagtgcttcaaatatgctactattatgttgctcgatatatcgcgaggcataatagttgagaaagatggaatggacaatggcggcacaagcgcccatgactgaagccacttattacattctgctggcattgatgaaaccgggacacgggtacggcatgatgcagcgcatcaaggaactctccggaggccgcatcgaaatgggtcccggtacactgtacggtgttctcactcgcatgaataaagaaggacttatcaccctaaccagcgaggaaggccgccggaagaattacgctatcacagaagaaggaaaaaacgcgcttcatttagagtatagacgcttaaagcagctcgtgaccgatggagcaattctggaggaggtagaggaatgaactggagacatggtattcatcccaataattacgccataggtgaaaccgaaaagtattattccgatatgtccgagaaaggttgggagcttgtcaatcgcggcataaccttgagccgtttccagaaaacagaacccaagaaaatgcgataccgggtcgaggttgtaaatctgaaatctttagaggacgggcatctgccagaagaacagattgcagtctacgaggattgcggttgggagtatgtcatcagccgcggatacctgcacattttccgtgcaccggaaggaaatggtgccccagagttctatttggaacccgaacagcaggcagcaaccttaaaggggttgcgaaaacaataccgttcttctctgatggctccgttcatcattttggcattccatgcttttatggctgcgcttgttggcggtttattcaatggccgttgggcagcgcagttgtaccgaggattggtagaagaaaccgcatgggtgattggtttctgcctgttcctgctctgggccgtgttcagcgatctatggggttttatttacatcagccgcctgtatcggcgtatgaagaaaggcattcctctggatcatgcgccgcgcagtcgaaagctcattatcatcccacgaatcatcagcctgctgttgctcatctgtatgttgggtacgactatctaaacgacgaacgatatactatgccagatgtatcagacggtccttatattttactctctgaccttgacattgagggtaaacgcacaacgaactctgtcaatggtgaaggaagtatggtcaaggcaaatcagtctatgttggcagatcactgggacacgcaggaatatgttgatgtaatcaacggcagttatagtagcgaagaatggctgtaccaggatgtgtacattctcaaaaacgaagacatggttgaccgtttcgtggaagttctgatgatagattctgtctttgcccagtccaccgaggattacacacgcatagaaatccccggcttggatcaggcgtgggtcacagaacggttggagtgcatcgctgttaaaggcactaccatcagtatctttactcacccctttgattcaccggaaggaatgagagaggcattggaagtcgttgccgaaaagtggggcaaataggaggtcaacttatgtacaaagaagcagcaggaaccgttatctctgtaaaaaaacagtggtggctaaaggtaaacgccaagcgcgtgagattacacgccatggacggcgcaatgtttccccacattgttaaagtagaatacactgttgatgggcaaacctatacgcaaagaaagtggattggagcaggttatccgaccccttccgtggggagttctgtaacggttttatatgacagaaacaagccctctcgggcaaaagtggtataagctcggtgatacaaagcctacaggtatcaaaacctgcaggctttgcttctgtgctatgagattttatgaagaatttttaggttcctcttgatttgtacgtagcgtatagccttacccatatccgcacccacaacaccgacttaaagaaacggcttgccgcctatgccggacagcaccccgaccagtgccgccagaccgacacagacccggacacgggctgcatggagtttgatattgcaaaggggcgtttctctttccgtctgaccgccccatacagcgaggaacgccggaaagcggcgcggcaatatgccagagatagtaacgccgccgacaggctgaaatagcaggtagaaatattcacagtcttgtggtatactttatctgttgtcagagcaacaaatgcgaatttgatgaggaagattatttatataatctaccgtctatggtctgaaaacgaccacctgtcgagaatcagtggaaatcgattctcgattttcttatactgtaaccgtaatagagatgagcaaaacgcaagttgtacaaaattgtgaaacaatatattgaattacaaattgttgcagcatctatatattgtatgccgctgcgaacaaatcagagttttgttcatccctaaaccgtaacaaagaggaggtgagcaaatgcaaattgaaatcaagttagatgagaactgcaaggaacccaaaatcatcgttgtgacaaacaaaatgaccgacgaaatcaatgaaatcatgaaaaggctttcagacgagcagccgaaaatgattgccggattcaaagatgatattgtcgaagtgttggagccgtttgatatttaccgcatttttgctgcagcgggcaaagtgtttgccgaaacaaatcacggtgagtacacgctccgtctgcggctttacgaaatggagcagcggctggacagcaacttttttgtccgaatatcaaactcggatattatcaatctgagaaaagtcaagggttttgatttaagctttgcaggaacaatttgtgttacgctttcaaatgggacggttacttatgtttcaaggcgttttgtcgccaagatcaaacaattattaggaatatgaggtggtaaaaatgaaaaaaaagatgattcagcgtgggcttctcggattccctctcggcattgctatcggttttgtaataactgtgattatatcaatgtgcataggagatggttcgttctatcctgtcacccctgagctgattgatacaatgaaaaatgaattaaacgcagttattcttcaaacaattctctgcggaattttgggtacaggcttcgcaatggcttccgttatttgggaaattgattcgtggagccttgcaaagcaaagcggaatttactttgccattgtctgtgttacgttgtttccgattgcctatattacgaattggatgaagcataatgccattggtattctttcatatgtaggaatattcgttgcaatttccgtcatcacttggctcattcaatattttgtatggaaacgcaaagtgaaaagaatgaatgacagagttcgaaacagtaataacgcaaaatgagcataaccttcacaacggcaacttctcgtttatctgggagctgacaagaactgaataacaccgccacgagcagccatttcaatttgaaaacggctgctctatttttatgccgacgggcagaaagaagcgaccaactatgacaaaaccgagagagaaaacctatgacgagctgaccgccgagcttgaggacggaaagaagaaaatccggcagtttgagaaccgggaaaagatgttgcgtcaaaagctatccaaagaggaacgcagaacacgcagccaccgccttatcgtccggggcgcagtctttgaaagtattgtgccggaagcaaagaacatgaccgacgaggaagccgcagcacttctccggcttgccttgacgagtgaaccagcgcgggaatatctgaaaaaacgagcagagggagcgacaagctgaaaatcccttaggaactaagggcgcacttatacacccttgcgggcgtgtgcgctctgccgagggcttatctccgcacaggggacttcccccgcgctccgatatatgtgaaattatgtcacagttgtttgttcccgtggcattatttagcgcataacccccagtgttattacttttacaggaaaaaattcttgtccgtgcaccattgcttggcgaatcaattcgccaagtctgatcaagactgtctgagactcgtgctttaatatatacattgcgtcgcgcagttggtgtgccatcagcagtcatataaagaccttcgccaccatgggattgaagagtataatttgccatgatttaacctcctattatttttatatctgggctcattctttacaacgtcttttacaaacggtaaaataatgataaacaatcaaacttatcttgataatcgtatgaaaggggcagcataaatgaaatctaaattgcttttggcagttgcctttttgtcaattgtcttgacttcctgtacagcaaaagctcctgtcccgtccagcgcgtccgatcccggggaaacagccgtgccaaccacagaacatcctatcccgtggttggacagaacactcgagtatctgccggaagtactccctgagcaatacagggaagtattgtctccttgggatccctacacgagagcgcttctaacggacggtgtagtgatcgttgcgccggatatgaaattttccagtttgcctcagaacttccgggataccctgaaatgtatagatagcgaccttccttatggtcagtacctggatgcggatgttcaggaatttcaagatgtgctctgctcagtctatgagaacgacgatttgcagatcataacggcatactttgacccgctgaaagaggacctctattctgatgccgagatcgaatatattcgggttgttcacgcacgatcggatcatttttgtacataccaaggggttcgactgggtgattcggcggaaacttatacaagtcaagacgcaggtacatcgatttccaccgggacaccgtatatgacctatgtgacagacgatggcaagctggcggatctgttttccagttcttttgctgagatatctagtctcaaggatagagttgctgacatttcttttgtaaaagattaaaaactcgactccattagcactactatgttggagtttcgctattttactgcatcgaatttcctcctccttactttctacaatggcgagttaaaggatgcatctactgcattgccttcattcatgtattgattggataagccaaaacattacatgcataaggccatttgcacagtatgcggtcaggcctatggcggttttgctgcccatagtctgaccaagaccgaagccaaggctgcgacttatacagaaaccggcaataatgaatactacacctgctctgtttgccagaaggtctttaaggatgcggctggtacacaggaaaccactgttgaagcggagacgattgcaaagctgacccgtccgtcctccggcggctccagtagccatggggatcgtgatcccagctatgcagtgaccgcacccagcaccaagaacggcgatgtgaccgtcagccccaagaacgcttccaagggcgaccgcgtgaccatcaccgtgacctcagataagggctacgagttggacaagctcatcgtcaaggacgccagcggcaataagctcaagctcaccgataaaggcaacggcaagtataccttcactatgcccggcagcaaggccactgtttccgctgagtttgtcgaggaacaggcggctccatctttgcggatgttcccgccgatgcgtattatgccaaggctgtagaatgggctgtgaagaagggcattaccaacggcaaggctaacggcctgttcggctccaacgattcctgcacccgcgctcagatcgtcaccttcctgtggcgcgccgccggttctcctgctcccaagggtacggctaaggttcctgctgacgtactccctagcagctactgctatgacgcagtggcatgggcgctggaaaacggtatcatcaacggcctggctgacggcaccttcggggttaacaacacctgcacccgcggccagagcgtgaccttcctgtaccgtgcgatgggcaccgctcccactacggtgaacggatttaccgatgtggcggctgattccttctgcgctgacgctgttgcgtgggctgtggaaaacggtgtgaccaacggcacatccgctacgacgttcagccccaataacggctgcacccgtgcccagattgttaccttcctgtatcgcgcctatcagggcaaataaggggcatcagcctatataatgcaaagcgaggccaccggaaattatccggtggcctcatgctctgctcatgaacggtatttggttgatgcccctctgcgggggtgcctttctctaccccgcttctgtaaacaagcaatttattgtaccggctgattgactaagccaacgaacagtggcaatccatcatagccagtgatggcaaacaggaacggacggtccagtacaaaatccatttcctcttccggaggcgctgcagctccggccatcatcatcacggtatatgccgccgcggtcacaccctcttcgtcgatggccacacgagccgcatggtcggctttggaaaggaagatctctgcaacttccgaagtcatggggctgaaatcggccactgtgacatcaaatacatccgtgacaccgagggcacgaaggccgtctcccaggtcaaaatcagagacgacgtcaaatttgggaacggacatattcacgatcaggtgcttgctgttctcccagtttccattgctgttcaggaattccatcgtttgctcatcggcaagcagatcatccatagccacgccctcatcaggcaggaggaaccacattttgccgctgccctccaggctcatagaaacagcaccaaactgatctgcccagtaataggtgttgctgccgcccttgtgcatgaagtcgcactccacggtttctccgtcagcgctgagcaggtggaacaggcccttttccgttctggcctcgttgaactcactgtgccacttggcacggtagtagatggtagaggccagagccataacggtctcggggtccatggacaggccatcagcctgtgcttccagcagtcctccggtttgctcgttgatccagtcccgcagagcctgattaaattcctcgctgcccatctcgccacggaaggaggacgcatagtaattctttgccagactgtccatggtggcctggttgaaattcacggactcattcagccacagggagtttgccagaatgcttgtcacagcgccgtcattgctgtaattggcgttccaaacgctggccgcctgggagcgcagagcctcaatattctcactgcccaacagcgtgaggatctgctgtcggctctctccgtccgtcacctctgccagcatggcaagggccatgtagacatttatgggagagtagaccttgtttgcgccgttggaattgctgaggaactcccggatcgaactggcgaagaacggttccagaccatctgcataaccctccggttgattgcgttgagcgttcctgtcttccttccatgcgtcatagaccacatcaaagctatcgctgtcgaactcgccggtcttttcatcgaaatactccatctcattgggatagggagccatctccgggtaactggccagagccagcgcataggccgatgcagtgttgttgggtttcttttcatccatattggtatctcccgcacagcctaccagagaaatcaggcaagccgccgtaaggcacagtgctatcaatcttttcatgctgcatttcctccttagtccacgatggtatctgtgcagatagctgctgttatgattcccaagacctcgtcgccgtagctgtcccaccagtcggccacgccatgagtcgttgccacaaaattacccttgctggccggatagctgatatagttccagatcttaccgccgtcgtaagtgcccatggtgccatttccgaattctttggtttccaatccggtaccgcagacaccgaatgtaggccagtagtggaagtcgatccatccatcttcaccagagggacggaagctaacaccgtagctcatgccatcggcgctgtattcctcaatcatatattcccacccggacaggagggggatactgacgccaaatccgtcgtattcataggcgatactgtttgctgtggtgctatctacgatgtcaaagcctgcataataggtttccttatcaaaatcaccggtgccgcggaaatccatgatcgacttgctgatccggtagctgccggcaggaagttctccgtacaggcggctccagttcacatcccattcggtatcctcgtttgcagggatcatccatgcttctgacgtccaggcaagctcaccctccatgggaagcagctcaactgcgacccattcgccatcccggagaacctcgaggccataatagctgccggtattcaattcacctgtaggctcgccgtcctgctgcgtacaaacaatggtcaagccggacggggtgatattctttgcggtcagcttcacaccccaggggtcctgataggcgtatgttgccggggtgcggctgatgcccaccagaccggacactgcaggtgcacgctcgctcaataccccgttgacccacaccttatcggtgggtttgattacatcgcccatctgcacttcaaggaacagatgccactgagccatgtcatcagtcacaacttccggtgccttgctgtcaatcgtaatggcccagccatccgatgcgccatcctccaagcggtggcgacgcacatccgtgatctcatggcggatagagccgctgccttcctgcagcacgatcagcaccagattctgccgttcaaaataggcatcatcatacttgtcacaggcatccagaaaaccgatggaggtatcggagtaaactacttctcttctctccaagtcatagatatccttgtatgcctcatagtaggcctccagctctgctttggaactgatcacggcatggtaaggatagcttcggtcatcagagtaaccgtctgtgcggatgtattgtgcatcaaaagcgtatgcttccggcgcgggggctacaacattgggatctgcttcattggcaactatggtccaacccagctccgcaagttcttccataacttgctcagggatgtcggcctgcgtgccgtcttccagcttcatataccaatacgcgccggtgccgcccggataggactcctgaatgccgtcgtgaagaagcaggatcttatcgcccgtctccaagccagcgaacataccttctttgtccttgcggttactcatgacaatgggcgagttgccgtcgatgaacatatacgatccattctccgccaccaaacagcgacccaccgagaaatccagagaatgactgaccatataccaaaggaggcctgcacaaaccaaaagcagtcctccaatcacacaaagaggaatcatccatttctttttctgcttcatgccagcagcctcctttttcttgtatcaggcataaagcctttgtatatatagacgcaaaaaaacggccaaaagttcccaatggtgagcaattcaccattttcaataatatatgctataattatttcagaaatagtgaaccaatcgaccttcgtcgttgtatatgtaagtgaaagggggtgcggagagcttgatcgatcaatacattaggcaatacggaaaacggctgtatgggctttgcctgtctctctgcgccagcacctttgaggcagacgatctataccaagacacatggctccgggtagtcaagagcatatcgcagtacgacccaagccgagagtttgagccatggctgacgaagatctgtgtcaatacataccgcaacaccctgcggcgtattgcacgaagtcccttgctgaatttccagacgaacgaggaaaaggatgcacttctgcaatcagtcccggcaccggaaaatccggactacggaccactctatgaggccgttgacggattaccagaaaagctccgactggctgtaatcctgttttactttgaggaaatggacattgcagccaccgcacaggtactgggcatcccggagggaaccgtgaaatcccgattaagcaaagcaagaaaactattgaaggaggtgcttggccgtgaatcagatttacaattttgagcagcacaagccgcccgtactgaatgaaaatatgctccgtgctgaactggaacggcgcaggctccgttggcagacggcattggttgctgttgcaggaacccttctgctgatcgcagcggcgatgctcggtttccttgtgctggaggactatccgtggatcactgcattgtgtctggcctatgtcctgttctccgctaccggaggcagtgttctggccgttgttgttactaaaaaaggaggtgttatccatgagtaatgttgttattgcaatcccgctgtttatgctcatgattatagttgcgttgctccctctcctgattggtgtctatgtctatcgggatgctaaaaggcgtgggatgaatgcggctctgtggacactgatcgcaattttagccccctcactgatcggctttatcatttatctgcttgtgcggggcaactattccaatctgaaatgtccacgctgcgctgccacggtcacagagcaatatgtggtatgccccaaatgcggcgcaaagctcaagccgagctgcccgaactgctctgctcccgtagagccggattggactgtatgcccgaaatgtgcgcagccacttccgactgtgcaggaagatatcgttacacccgtgcagcccaaggataaaaccctgtggaagatcctggcggccattattatagttcctgttgttttacttctggtgttgggactcagcttctctgcagcctctggtggaggttcctccagcctacgggaagtctccttcgatgaatattatgctgatcaggaacttcccgaaagcaccaaggagtatgtgcggaattggttgggagaaattaaccccagaaccgaccatgtatacgcgctccgatatacctaccgattcaatccgaatagtgaaaccacagactattactatttgatttatgttccgggtggtggcgatgtagatcgccgtggctttggttattccacagggttgttcagtacggctttcaagctggaactggagggcactaatgatcaggatggtctgtactgtgttatgaccacttccaagaaagctgccccgcagcttcgcgttactttgaacggcaagcgtttggaagatgaaatcaccgtcgtggacttcaatcccacactctacaccattgcatctgcgtacgccgctctgcaaaatcagctcgaccggcgaaattgagcagcggttccgcttgaattgagcaatgggaccgcccggattgagcagtcccaccgctcaggttgaatatggacagcacaaaggtgtcaaggtatcataaatacggtcggagtcagatgtcttgcagccccttccgcttgcgcatggattccttgccgccaatgactatggtgtaggcgtcgtggacgattcggtcgcagatggcatcagccagcagtgggtcagacagcttttccggccagcccggaatgtcaaactgggaacagaagatcgtggagtttcgcttgtaccgagactccacgatttccaataagtccctggcttccgtttctttcaaagggtacagaagccattcgtcaataatgagcagggcatacttcctgtactgggccatgaacttgcggatggtgccgttacccctggcaatttggaactctaccagcagatccgggagccggatgtacttcaccgcataaaaccgccttgcggcagccatgcccagagcgcaggcgagataggttttgccgctgccggtggcacccagcaggatgatgttgtggtgctcctggatgtagttgcaggtgccgaaccgcagcagttcctcctgtttcagacctctgtcgggcagatactccacattctccagacaagctcccggatccgagaaggttgcctgccggatcagcttgttcagatggttattctttcgggcattccattccgcatccaccaaaagaccgagccggtcctcaaaggccatgctttggaactgcggatcggcaaattggtccttcagcgcgttggccataacgctcagccgcatttcacgcagcttggataccgttgtttcagtcagcatcacttgttccccctttcgtaatacgcagctccacgggtgaatccgtaccgggatgaggacgcagtagccgcactctgctcagggatggctttatcctggccagatgccagaatagcctggatattcttgagagaagggcggggggtgtattccaatgcccgtttgcaggcattctccagccgttcgggggtgtatttgtctgccagcttcagcagacccatgcaagacttgtagccctgctgctctactttgtagccgctgagaatggcttggacagcgacctgcgtgttgctgccgactttaccggcccagtgaatgaaccgttcaccattccactggacatacttctggtgctctggcggcatatgctcctggatcgtactgtactggttaaaccgtccgtacagcctgggatgggaacagattcggtttccaccgtagaaaacctctaccgtggctttggtgagccggacatctaccttctgcttgatgtattcaaagggaacagaataattcatacgctccacagaaatgtggtaatttggtcccaccgttgccactttccaggtggccaattcaaaaggtctgggcggcaaagggcgcagaaagggcctttcttccgcaaagctgctggcccggctaccctcccttttctggaaaggtttgtggttgaacgtctccagacggtcccaaatcgccttgttcagttccaatagagacaaaaactggcggttccgcagagcggccagtatgaaggtagagatgataccgacggtaccctcaacagcagctttatccttgggagtgcggactctggcaggcagaattgccgtgccgtaatgctctgccagctcctggtacgatttgttgagaacggcctcatccttcccatgcttttgcacgccggttttcaggttgtcgcactggatgatccgggtgacaccgccgaagtatttgtaggcattcacatgggcagtggtccacgactcctggttcatggagaaaaaggcttctacataactgtagccgctgtacggcaaggttgccacgaacacataggctgggataatttcaccggtgtctgtgtcaataacagcggcagtatcgccggcccagtccacctgcataatctcaccgggtttgtggttcaggtgcatggtggcgttgacctttgtcagatagtcggcatagtacttgttgaactgggttgattggtatggaatctcgcccgccgcccggcactggtcgcagtattccagccacagcaggttcagagtaacaccgctgcgctggagttccttgtggacagaggcgtagtccggcatcttgtagacaggctttgaggtgctggacggaaacagccgctctgagagctgcttatccgacatttcctccggcagcggccattgcaggccgcagttcgccgcccgttgcagggttgctgccacagtgttccgagcgcagcggcagcttgacgcgatctcggtcttgttgagtcccaggctatggagcctgaggatctcacggtaattggtcatacaggtgacctccttgtagatatttacgccagaaatctgacgcatatctacattttaccgcagtgctcaacgacagcggcaagggtgctcaatcccgccggaatggatgctcaatttgagcggttgaggtgcgcaatctcgtgcggaatactcagcatccgaatccgattacagtatgctgaccaatgccgcaggcgacctgtatctggagcagttggaaaaggaaatggagccagacctcgttgctattactgttgtagaagatgggcaaggagtggcaaccggcgaatttgatgcacctgactttctgcttaataccgttactggcatccatgagttgcattatcttgaagagtaccccttttctttggagaatttccaactttccgactattttaccctctccgtccactatgcggataccactggtgaggctcactacgaagataccagcaactatttaatcgtcgaaacggaaagcgcatggtatttgattgaaattggacctaatagcgtgattgagaagattctggaggagggccagattacaagcagggatgatgtactcgtctatgaaataagcgaagatgcctacagtgagttggcaaatctattcgacaaaacaacataaggaggtatgtttatgggaaatatgttatttgatttcattcttcatcctgcttttgtcgtgtttgttttgattgcacttttcgctgctgttgtggctttagtaatcgctcatagacagaagcaactttcagccggattgaaggcgattctcatttcagtggtcgtactgtgcgtcctataccttctgttcatggtaagccttgtcttcttgtttgacagttcacctcctgcaccccctgttccgtacactccataaacaatagtcaagcccacaggatcatcgtagttcctgtgggcttgattttactttgctctttttttgaaatagaccaacacaactgcgaggcactcaatgcaataagctgctccgaaaatcacatgacggacagcagcgacttgccgagcctcttgaagatcctcttccgtacatacagtaatcggcaaaatcgttccatccttgggagtgtatcgaagggaaactacacttctgcgactgatatattcgcagaccacattgccgttcttatctttcagtcggctcttcagggcttcttcctcactaatctcattgccatactcatcataataagtcggcgttcctatctgttcttcgggtgcaggaacggctgctgattctttaaggctggcattgtatgagggattggcagggacatcctgctccatatattcaatgaagctgtcgtagtcctcgaatgtggtgccttccataatgctatacgggccccaaatggacgtagcaaattgatgaccaatgaaagtaactgtcagtactacggcaagtacaatggcgcaggtgcgtttcagcttatggttatgctgataaatggttgactccctctcggacaaactatatgttccttttttcagaagggacgcattgaggaaataaagcacaatagcatagatcagtagaaatgccgcagcgcccatcgcgccccagatcagcaggctgtcagagccgagtcccatataggcatcgactaaaatcaaggggaatgtgaagccgataaacgctaccgtcaatccaatggatttctctgcaaggccgatgacttttcgcttgaagtcagaaaggatgtctgcatccagacccgcatcttccacgctgaaaaacgcttggttcacgaacacagcttggcaaacgatactggccgcaaagaagatcgcacccaaaaagaagccaagaatggctttcaggaaagccagattacagaccagcgcaacgatcatgccgaccacagtaatacccattgcaatgtaggtgtggttcttatattgagatagcgtggattttaatagacgctggcgctgtttctcacctttgggggtggtctcattctcctctgaaatcacggtacgttcttcaggtgacttccgctcaccccgaagcagctcatcacaggtaacgccaaagatttccgcgatagcagggattgcagccagatccggcgcaccatcgtcccgctcccaacggctgacagtcttatcagatacattcagacgctccgccaaatccttttgcgtcatgccgtttgcttttcgtaatgcggcgataaagccgccgatagttttcttttccatattgagtcctcctttggatgggtggtttgctttctgtgtctttattctaagattgtggtagtgagaaagccacccaatagactcagaatcactctcggaatacgagaatcacggcattttgccctatgagagcactggttccatatccccgtcgtttgtcagatcaccgtcaccgctgaccggaatcacatcgcccagataggtcggctccggtttcaggatactcgtcgcaaaatccttgttacgagcaaggatctcacgcaactcacggtatgcttgtcccacataggtatgatagtctgcggcaacaccatacgcctccacgcccagggcgttggcaacatgaagcgcacggtagaggtggtattcctgcgtgacaatgatgatcttgtcagcggcaaatacatctcttgcccggaaaatgctttcgtatgtagagaagccagcgtgatccatgaagatatcctcggaggggatgccttcgtccatggcctccaacttcatggccttgacctcgttgtagtccttctgtccgtggtcgccgctcatgagcagcttcggagccgcaccggactggtacagttcaatgcctctgcgaagccgatccgccagcatatcgctggggcgtccgctatcatggacatagcagcccaacacaaggatgcagtcaacatccgtcagtgtggcagcctcttcagaggaaaggatttggtctgcggtgcttttcttcacatgtccattgatgcccaggacggtgacaccgccgattagcgcaaggcataatagtgcaatgaaaaggcgcttccatattctctttttcatatagcacctcacatttctcgccttagcagcgtttcaaaacaatcccttgttatacttgataattgcgtacaggctcaggccaagcccaacaatcaccgcaggaatcaaaaccgttgcgccgataatcgtatagacttcaatctctgttaggtaggttatcagtgagaataggccaaagacgataattgcaatgccaataatcaatgtgcctaatcccacttttttgccaaaaggctttacgtcatccggtgaaacccgctgtcgatgataccagtggagagaggaaatattgcccttcatgttggatatgccaagaatactgatgataatgccaaggataacaggacctataacatctcccatttatttcgcctccttacaaccggcttccgaatctacttccaaatcgtccggtggtttgttcaatcggatatcgcagtatctgctggaacacacaaataccattcggtcatatagagaaccacaataccctcgtccacctttgcatacttcatttccaaatcagggtcgtaatacccagcttcgggtttgctttcgatgtaaggaacggcgtgttcaaggaatgtcattgattcaatctcttcggactcaaaataaatcggatcgccaacaacatagtaaacttcaccatcaatggtgactgcagcccggttgttgtcatacgcagagtctgtatctatcttgacatattcgattttctcatcggcagcataatatacgatcacatttgtgctgtcatcaacctcccagcgatctccccaaaagccggagagcatactgtcaggttcgccccagatttcgcgcagctgaccacggtcatagccgataaggtcgttgttatcaactgtataggctccttcttcaaaggcggaaatcacagattctttagaaggaatatcgtacatgcttctcgcgcccagattgccatgccaatctgtaaaaatggctgcggcaactaccagcagtgggagtgccgccataaaaacataactccgtgcagatacagcataatcccgtttgcgccatagccaatctgccacaataccgattatgcagccaagagcaggtccgatgcagagcaacagcaaaataaggtaaccaagcgtatcccagccgctggcagccacacaacccacggctgctactattgccacgatggcgacaaccaaaagcgggagaaacttcacccattttttctgaactgccttgcacaaaagcatctgtagaaacagaaacggtacggcaggaaaataaaacgcgcaaatctcgacggcaccgtaaatctcaaaggggaatgctaccgctcgaacaaggaataggcttatgctgactacaagcgatactgcaaaaaacacagtcagtatcctgttggaatgatttttcatagaagcacctcacttataggtctgttttcaaatcaaatccacatccacatcgtccatcagtttctcgctgaacacaacgcgccactccacatcgtccacaatcggctcaaaacgcagagaagaacaagctgcgtggagcttcggtgcgctctgtcccatgataacagacgtggggccgtcagcaccgccgataacaccgattactgccgcattacaaaaagctaccggtgcaaattcgtcggggtcacgctttttctgccttggacggtcgccctcggtacagtcctgaatcataaagccccgacctgaaatgtccggctccagagaatagctcatcgcaaggtaatggctggggtattccatattgggatcatggaatgcacgctccggcaactcctgttgctccacctcatggacggtcaacgtatatatctttccagtcataggatgagtcagggaaatgctttcgcccactgtaggagtctgaaaatgctgtcctgcgatattctccctctgccgctccatacgaacagtgagagactgaatatccagaccgtttacttcgccccaacggtagcttgaccgctgcatataccaagcaaggctaacatccaggccatagtgttccataatctgtattgcttccgtctcccggcgcaagccatcagccaaacagctttccggaatccacggtaatccgcagctgtggtcactttgcagcttatacccattcaaagttacacgccccttaaagctggtgtgtaacggatgctctcgctcaatttgttcctgttgctctttggtatagtgattgttaccttcattcagcaaatcccatttatcaataaatgcttttacctgaacaggatcagcctgtttacagtagtcgatcacaaggcctttatcacagatatacacggcagggatataccacttttcttcgccccagcaaaaggatttttggatagggatttcaatgcctgcgttgccttcatttctccaaaaaccgccgtcataggtaactttccattcttctgccctaacaggtgccgccgcattcatatccggatcgtagtattcttccgtatagggaatctgagataggtcgaattcagcctgcagcttctttacataggcaaaggcgtcctctaacggcaccagcctaaactctgtccgaagtacatccaaaacagactgttgctcctctgttgcaggacagtcgatcagaaatgccttaaactgctcctcatcccaagcgtagcactgctccagtgcatccatactcccacaggaaagcaacagacgaagaagattctcgaagctgtgtgcaatggggtgaacacaatccccgaagttcatgggactgaccgcaaaaatcatctcaccaaactccgggatggtgcagtagtggatgccatccacaccggcccagccgatgatcgcggcatctctgggagtgcagtagtaggtaacatcggtatcgctctgctccaaaccaatagcagagtgcctgatgttcagtttcttaaatttctgataagtggtcattggtggcctccttgaggtactgcttcaaaagttaaaataaggatggtttcgatattcgggtgggagttctttcccaagaccggtccaaccaaggtttttcaccaatacagacttctgctctgggaaagcaaactcattcaggtagtcaatgaaatccgcttcgttatagcagtagactcccttaattctataacgctttgcgtgaggacttgttttcatccacttgtcgcaaaactcgatacaatatttccttagatggttagccacatcatcgggcacagaatatacgacgctgtctccatcggcactgataattatttctttcataccaacatctccaaccttaattcggggttgctttcaattcgatcagaataacttccgggcggttgttgaaacggaacggcagaatactgtttccgatgcctcggctgacgatcatattcgtgttaccctcggtgtataaaccagaatcatacttcgggaacaagccctgattgggggccaccaggccgccgacaaaaggcagtcggaattgccctccatgggcagcatggccgctaagagccagatccacgccacaagccacataggtatcgaacaactccggtcggtgggagagcagaacagcaaacccatcgtcctcagttgaaatttccgccagagtgttactgactactgatgcggaatctccgaacagataatcagtattaaagctgggatcgtccacgcccaggatggtgatggtctcgccggatagctcgatctccccccgttcattttccagcaccacgaccccggcagcttccagacccgctttcagctcggcacactcagaaactcgtgcttcgtgattgccggtgacataatagcagggagcgattttcatagctttctccgcaaatgccagtgcaacctcaatgttggtattacgggagtcaatcagatccccggtgatggcgatgatgtctggatcggcctcccggagcacagcaagaagcttttcgttgccatcgcccatctcagcattgtgcagatctgaaacatgggcgatacggtagccgtcaaatgcatccggcagctctttactgccaaccgtgtaagtattcagttccaacgctgtattgccccatactgtccaaacgacgagtgccagaaggacagcagcaatagcaagtataattgttcgtttcttcttgccagtcatagaaatctccgcattatgtgttccggcgctcacttttccgatactcatttaggttgtagacaccggaggcaacccaacccaaagcgatgatgattagaatgacacgccaaaccggagccacttcaacgacaaaacaaaatgcatatagggcaatcaggctgagcaccatacagataattgttgtgataagttttactttgttacgcgttttcatatttctccttcaatctgggaatatcttctttgtcgatccattcctcagagtagccgcaggcgcagcaaacataccggtggacaagcacagcggagaaattgctccatccggtctgaatgttattgccgacaccgtatgctccggccttgcccggaactttgatgatgtctgtgctgttgcacttgggacaaatcttcctgttcttcatatcgtcgctccttatcccaatgtcagttcctgggggaatgcttcttttctcatgactccccacatcttgtcaatgtaggaaagggtgtaaaagttttcgtagtagtgatagtagaatgcgcccttcagcgtcatactgtatacgccattctcctcagtcacaaagcccattagctttgccagcttcagttccgcaccgtacatcttcttcagcggcacaccaaagaacttctcaaaaccaccggcagcgaccttggtgctgtatgccgtccagaacaggtagtagatcattctctggcgcagcgtgaagcggagggtcagagaggtaggcagcttctcttctgcaattcggttacagtattcctccacggaaaaggtgttgattttgaactgatctttcaacagagtggttgccgagcagccgaagccgaggaagttatcgcgggtcatggaggagtatctggcgtcggcctcgctggaaaaagtccagatggagctgcgggtgtatccctgatccatacagtatcgggtgatggcatccagcagctcccgcttttcctttttgggcatcgtggtcacggtactgggggtaaaggtaaaatcaatgaagggatagatcgccacatggttcgcgccgctctggaatgcggcatcaacgtcggccttcagatcctcaaaagtctgattcggcagtgcaaagataaaatccatggaaaccgtctcaaaggggacctcggacagagcctgcttcatggcagaaatatcaacgcttgttctgccaagaacactctggaacttcgtctggaaggactggataccaatgctgattttggtgactcctgcagttttcagtgtccgcaggacatccggcgtgacattatcgggatgcagctccacgccaatgccttcggtaataacaaagtgttccttgatggcaccgatgatctctcccagccggtctgccgcaagggccggtgtgccgccgccaaaatacaggctgttcgtttcctttttaccgctctgctgaccgcccacagcgtggatctcccgcagcagagcatctatgtatcggtcgcacagatccttggaatatctgaccttgcagtacggacagaagttgcagatgctcctgcaaaaagggatatgcacatacaggcccagattgtcgcagtcctggtaagacagaacattgtcgtattcatttttgaagatgaaaggctttgtcgaacgtgtcagccacattctggtcagcgatgtaatgatactcatatggctcctatatgtatctcaggtaggttgtcagcatctcaagtatgattttagggttacccttaaacaaaagggtgtactcagcaacgaagaaatagccgcattcgtcgcagagattaggtacatcgatacagcgtccacaggtggatacttttccgttttcgatgaccacgcattggtggcaaggcgtcgggaagctgttgttgatcaggtaagggaaagcgctccgcagattgaacaccggcgcaccggccttcatcatccttgtgatgacatcgcagcaatgggttttttcctctctggagagagccaactctctggtgtccggatagggcgtgtggaaattaaaggatactgcccggacatttttggtatctctggccgtaaggcaaacatgctccacagcatccttgttgatctggttgatggccatgtagaagcagatgttatcggaggtggcatgtttaatattctccatgatggtgtcgtaggtatcgccacggactgcattatgacgctcccggtcgccgtccagactgagcagaatcaagtccgcttccggcagatcaatcgggaaggtaccgttggtcaccacattgacgatgagaaagcccatctcctttgcttctaccaccagatcccgcagggtgcgttctccgtccctccagaggaaggtctcaccgccgcagaagaacaggatgcggattcccatgtcgtagagttgctgcatttctctgcggatctgctcatagggatgcacaacggcggtgatgttattgacggaacaatgcttacacttcaagttgcatttgtctgttacaatgaccgttcccaggataggctccttcttgcggaacaaaacagttttgataccgaaacctgcaaaatgcagaaaggacgaaagcttcataagtgtacctcacaaaaaagcatcgaaacagacactggcaatctcatcacggagcagcttgtctccaaatcgtgcattctcgtataatgcgtaccatccggggaaaagctgcatttccttactttcttcacagtacagcgaccaatcgccatccttgtggctcacgaaataatgcagaccatcgtgggacagttccatctcacggcctgtttccagagagaggagcatcagcccatcgttatagcgccgctgccactctttccagaaagcggtgtatccgttccggtcaaactcattctccgggatttctttcggggtacaggcatcgtagaaccgctttacgctttttgcaaaatccagaacctcgtactgatattcccgaagggtcacgacttcttcctgcccggaggggaggataaaccggacggcattgccttcatggatggtggtccaatccgttcctgtatcgcatccgctgatagcaacttcagtcaggtcatcattggcaataagagtatgcccacagcaggggatcatttgaatatcatactctgccatcagcttgtcgttggtgagcgttttcagcagatacagagcagtagcgctgacagtacccgtatcttcaagaacggtatcgccaaactgtaccgtaacatgaccatgcaggcaaagatcctgcgggtcatcagctgcgccaccgatccactcaaagttgtcggcttttattctgaaaacacccatgttgatacccccttaaccacaaagcagcggcaaccgattgctgccgctgctgttgcagcttaatcgtactatggatttccaatcagttcatgtcgattgtgtaaacgatagatttttcaaagaaatcttaaagaatacccgttacgctgggccactgccaacaggtaccgtttttgatacttgagctgcacatagcgcatgaccttgttgtaatagacgggattggccgcgccgccaaggatacccacaagcggaaacccttgcacgaatttcaggagcagcatgtctaccgcaaaagcacttcctgtcttctggatctgggcctgcagctcatcctcgccagtttgcggcatctcctcgatcatgccatccacccgtgcattcttcacagcaaaatcagggcctttggtaagagctgtttccatcatgcgaaggataaaaagccgctcctctggagtatcataggcaaagccatagctcagggcggtttcataaacacctttaagcaacataccgacaaacaccacgatatccggcaggccaatgcccagtgccccaaggccgattccttccacagttgtcagggcggtgtttgtcagaccagaccgaccggcatttcgcttgacctgtttcagttcctttcggccacccttgacctggacggcataatcctgaacggaatgggtctcttcaagattctgacggttgtaggttttttcaatgaccccgacgccttgagtaaataccacggaaaacgccttgctgaaagctgtctctaaactgcggtaaaccttctctggcaccttcttctccagatccgttttccagcggggtgctgtcgttttcatggcgctctgcttcagctgcgtttcctttttcagtacagaggcgtactccttttccagcgcagcacgcttcttgtctttctttatgaaaatcgacatagatgctccttataggcttaattactggaaacagaaacactcacaccgccctttgactctgtcacggcgtcgatggtcagcaccacggccagcgcaatgatctcatcggccggatccgcgatgtccagcttgagctccgggccatctgctcccgcaccgcccagtagagaggccacaaggcccaccaccacggcgatcagccatttgccccgcagcgcttcccgggcaatatatctaaaatcagcggcgtatttcatagcgcactcctttcttttgcggtcaggatcaagcattattggaatcgatagccggaggagcccatatggaatacagtctccatcatcttgccatggtctgggaagatgcgttcctcaaagccctcgactttttcgaacgaaataacaaggttatccttgtcgatccagatgctgaccggctttccgttttctctctttgcccattgtgcatcatccgtttcctgtggggatatagggccggatggacatggccacactgcagatgggcatggtctggagccacaccttgcccggcccggtgaggatcgtgttaaacaacccctcgccgcccagcaatgcgttcttcacgccgggtaccgcctgaatgtccatctgaacgcctgcggtaaaacccgccacattgccggtgtccaccaccagctgttcaccggggccaagctcatactccaccaattcgccatcgatctccacgaaggccataccccggccggacagcttctgcatgatgaagccctcgccgccgaaaagccccacaccgattttcttcttgaagtggatggacagctccaccccggcctcagcggcaaggaaggcgctcttctgcaggatcatctcccggcccggaccgatctccacggccttgatctggccggggaagctggagccgaaggtgatcataccctggcccctggccgcatagatgttctggaacatgctctctccggaaaacgccttggcgaacatcttgcccagaccaccgccccgggtatccatctgcatattgggggtcatccagaccatggagcccttttcggtgatcatctgctcgccgctctccagctgacagaccacgatggggaacgaaccacctttgatctcataacgcatattcagtacctcctataattctgtgtttatatcctgatgcaggacttcataattcctgctgctataccgatcatggctacgggaatgatcaggatggcgccgcccacaaacagcagaaagacaatcagcatgggcagggtaagcacgatgagaatacctgcaatgattttcgccatgccccaggtgagcttcagcgccagactgatagctttgatcagcagccagacaaaaacaataacggatagcaactcaaacatttcttttcctttcaatcagcgctcaaagcccttatatcgggtgccctggtgagtcagcataccccggtcaccgatttccagctcttgatactcgtaccgcttgacacgaagctcgatctgctcaccatcttgggtctcgaatgtaatgtgataggagtgactatgatgatggtgtccgttgctgtggtgatgatgtgtttttcttcgcttatccacgatagtggcagatcccgtcagaacgggagagttctcgttctcgatgaactggccgatacccttggcaatgatatagaaaaacacgacaaaccaaatgataacgaatatctgcattctgatcctccaatgttctgtaaaaggggccccacttcatcgtgaggaccctatgtctatgtgaagttttggctcaacagccttgattccgagggcttcggcgtaagctgggtttttcctgatcttatccagaagccgaatgatcaggattcgttctctcgcaatcaaaggtaccacttcctttgcttagatgtggaaatctgcctcctgcttatggctctattgtacctttgtgctgcccggaaataaatggctgtgtcagcaaaataagagggtataattcttcgtctggagaaaaataaaggctgatcagacctgcttgcctttcagagcgttatactgctctatatcaatgactccggtggccagcatcttttctgaccacagctgcagcgtctccacggtgatggagatgcgctccagctcctcctgtatgtagatgaaatccgccagttcatcaccggagatacgcccgtccgccgtgatctcgataagccgctccttttgcctgtgcatggagttcagggaagccagcatctccagcacaatctgggacaggtccttgatctggatctccggcacatactgctgcccgatgggacactggttggcgcagtagtagttgcaaaggttgggctgccggtatttctccgccatggccagtacctcgtccggatagggcagggatcgttcgttctcgatcttctcgatacgctccggggagatggtctccagtagttcgctggccgactctcgggtgagcttcaggctctctctggtcagctggtagatgttcttgttttcttttgtggatactctggccatgttcaacttcctcgcctttcatcatgcgtatcatcattatacgagttagcgacaaaaaacgcaactgccaccacgcgaagtaaattatatcattgtaatgccgtttttggcaattcttatctcctttttgtgtgcgcttattgggcagttctcttgaaacgcaaaaatcccgcacagcagccgtgtaacctgccgtgcgggaagttgaccctttattctgcgatcagacgatccgttttaatggcgtaagcatatgcttctgcgctgacttttctcaggtaggccagcggcatgagcttgtccaccgtcaacttttcaccggcaaatgccgcagcatcctcaattcgctcatagtcattgcctgtcagcaggcacgccgccatatacattaccttagttgctctggtggcggcgatctccgggctgtagttttctgcgtagatatggccgcgcagatcacggatgccctttacatacagagggtattcctctgcatcggattttcctcgggacgcgaggcaaagtgctgcgtcaaatgtatcccgaaggcagtcttccacactggcatcgctgccgcggtatgcaagttctgccttggcaatttccgtgtatgtatggtgcactttcgcagtgtcctcaaagatatcaagcagagaggtcacatcgtaaaactgtttcatgacctccatatccttgccgtcattgaggagaataccggtggtgtggggtgcaaatgcggtgagtttatccgccaggatacaatctgcgctgggaatctgtactgccagatattccggctgcgtttgcagcagctcgtttcggatttccttgctgataagctcagcataatggttttcctcgaacaggacgtccaagaggatatacaacggcttatggtttaccggggaatcataggtaaacttgaaatggcgcttttcgatattatttttgccgatgcgtttttgttcttccgcactctggaaagggaatatcttggatgcctcttcgataaaggcatccagatccgttccgggctccacaatgatatcaatgtcagtggacaaccggcgcggacggttcatcaggagcatcaggcaggtaccgcccttgaaaataaagggcattcccacgcgggccagagcctccagcagtccaaaggcgtagaccgcacgctccaacagtacggggtcacgtttgctggttttctgaagttcccggatatgctcttctgaaaagctgattggctgtatcatatcgttactccgttcttaacgtaatatttgtcttttctcgaatcagcgccctcagccgtttttcagcagcacggcgcttggcatagcggaacaggcagctctcgtcgattacatagccggaaaaagccccctcaaagatggccggatattcgctcttactgatcacttcctgcagcagagggtcagaaaccaaatccaccagcatcttttcaaggcgggtatgccatgcttcctcgtttcctctgggagcctcagtgaccagtttgtttaatacgatcatgccatcataccaatactggtgatacagttcgggagtcgggtcgagaagcaccttgccagggacctgctccttgagcaggtcgaaaacaaaatcaataatatcatcctccacggagaggaacagaacattgtgtgccaactgatgattgacaaattcgttgagttgcaccagttcaaaaatggtgaactccaccgcaggaaacgcttcccgaatagcccgtgcagcagcgcaggcctcctctgagtattcatgccgataattgctcatcttatttccggagacacaatacgcattccggccgactcgaacgacctctccgcttttcaccaggccacgcagtctcttgcgcatagcctcttctccaagcgggcagccattgtcctgattggtcataaagaaatccccaaagctaaaactcttcatgccggccaatgccgtcagatgaacctgattgaacatgataatcacctcgcaaaccgtcctattttggcaacagatactcactattgccgttttggtacaattacattatactgcttttctccgtttcgtcaataccatttcggcaatagagggtgtttactgacgaaatagtaccgtcgaaacatgagaatagtattgcccttcaaaagcattttattcgcagagccgaaaatggttgcatcgaaaggtgaaatctcatttcaccatacctgaagcaaaatgcttggaggattctgttataatggttttaagaggaggtgcagcatgtatagcatatcggaatttgcaggcttgttggtcaagcaggcccgggaagagaagcaatgggatcagcagtatctggctgatgagctggatattgatatccgcacgctcaagaaaatagaagcaggcaaatcagacatatcatttgacacactgagcagtctgatccatctgcttgaaatctcaccgaaaatcctgttctatgctgatcgcacagaaaccggcgtggagatggataagatatttcgtcagctgatgcgcttttctccggacaatatccagatgatctgcgattcagcccattacatccgggcctggaaggatgccaacggtgatgactaccctttggaacaataaagcatgaccgttaagagagatccctgcgccggagaataccagcgcagggatttcattacacttaccacttgctcatgatcttaccatacatctgcagcttttcatcttcgtagcggacttcccaaacatatcggagactacggcatccaacgtcagattgcacacagtgaaagcgttctggaaacgattcttttcactggaacgcatggacacgagcttacttcgatagcgggtgaactcgcggagaatacggatatccttacttggaatgaaactgctgggaactaagcccatacgaaacagattgccgacgacgtacagtttgaggttgtcggtatctctgacattcgggaaaccgacgattaccccggcatccgggtcgcgctgaaagcgaactatccgccgatcagcgtacctctgacggtggatgccaccacgggcgacatgataacgccccgcgaggtggaatacacattctccctgctgttcgataaccgcacgatcagtattcttgcctataaccttgaaacggttttggcgaaaaagctggaaactgtgctgtcccgcaacattgcgaatacccgtccgaaagattattacgacgtacatatcctgtacgcactgcgcggcgcggagtacgacaaagcgacgctgcgccgggcgctggaacggacgacgcagaaacgcggtagcggcatgatcctgacagactacccggaaattatgaaagagatccgcgaaagcgatacgctccgcaagctgtgggagaaatacagccgcgagtaaccgtgtgcatttcatgcgggttccttacagagatccgggtagtttcatgctccgtttgtcagttacctttgttcaccctgggacacttgttagtgttgaaaaaagaacgtttttcggatactatataggtgagagcggcaaaaaaagcggtacttttattcgtgcaataggggcgctggtatgataaaaggagttggcagcaaggagtatcgctaaaatgagagcgtttcggtaaacgatctcgttggcattgactgcgggcatatctcgaattacacctattgccgaagcccggaagcgtcctgctttcgcggactcggtatgctttccgcaaacctgactattatagcgcccatagcgggccttgcccgcgtatgcgcacagccatgccggctgtgcgcatttttttatttctgccgagctcctccgtttttgaaaaatggttttaccaaatctttcagaaacggagggtgaaaaatgtactttaatcaggtcaaattcgggtgtcggctgaggaatctgcggaaacaacggaggatgacgcaagaggcattggcgggatcgctcaatatcagcatagatcatctcagtaaaatcgaacatggcaaacgcggtgtgtccatcgatctgctgctggatatctccgaagcgttggatgtctctctcgattatctgctgaaagggacgatacacacctcgcttcagatgaaggatctgattggacggatgcaggaactccacgaccaaatggcggcaatttatgaaaacccgttctgacagtccgggtttttgccccaaaacccggactaccccgccatacaaaaatccttttggcagagttacaatttactcaagccaaagacgacggcttttcgtaccttgaaaaacactgcccccggcagtcatatccggcgacgaataacgtcggctgacggccccctgacgagggggaacagcgatgcggcgggtgcgcgaagaccacctgcatcggacaatcgtccgatgtcaacgaacggcctttaaggtgcagagcgaaactcatccagccaaaagcagatgcggcgatctgtcttgcgatgatcccgtcagccctgaacaaacagcctgtccagccacagatgcaagcaatgggggcagctcgagagatcctcgggaggtgagagtcctgttgggcgctgccaagcgccggttcgttcagccgcccacggtccggggagtagtgtcgaataggactgaacaaaggattatttcaaaagcagcgggagccgccagcatgaagggcaaagcagcatgctgccaaaaccatgtgcggcggcttccgctttcataaatatgaggaaagcattatgaataccaatatagactatctgggtctgctggcccttctgcgccgcttgctggcattggagctgatcaacgattcagaggcaaaaaaagatcgccgtgcggctgcgcgtggatatgggcgcggacatcgcggtttttctctgatttttctcttttgggtatggatatttttggacttcaatgatattgtgtgttgctgaacggggggtgacagtggaatgagcggcaaggaaaaagcgaaaggctcgctggcgctggcagcgccgagagttattacgatcccggcaaatgttccggaaattggacgaaagctccgcgtggcggcctacgcccgcgtcagctctaattccgacgatcagacgcattccttcgcggcgcagaatgcctacttctccaagctcatcgcaggaaatccaaattgggaattggcagatatctacgctgacaagggcgtcaccggcacttccatcgacaagcgggaggacttcttgcggatgatggaggactgcagaaagggacgcatcgaccgcatccttgtaaagtccatctcccgcttcggtcgcaacacaagagagcgcctgaaagcagtgcgggaactggcggggctcggcgtcatcgtcctgttcgaggaacagaagatcgacacggcggagaccaccggtgagatgctcaccgctagtagtatgcttccaaccaagacaggagcggccttcgtttttttatctctgagctaagaggtgcgttttcaaaagcacgttctctaaggctctatggtcttcatgtaactgccaccaacagggcttcagaaagcagagaacattctccgcccatcgatagtcctctggcttcagcgtttccaatgcagcgctgcgctggaatgccgtgttgcgcttccgcaggttggcatccacgctggcccgatccagatataagttcagaaagccgcagacgatggcagcttcttccgttgtatagaacatgctttccctcccattccgcaaacaggcatcattgtaacacggtgctcttgttttgaaaatgggctgtttccacaagttttctctcaaaagtttgttgcaaacagttgttcgatttacgacggcgtgctatactgatagacactaaggacgaggaggcgcgctatgcagcagagcggacggacatatattgccattgacttaaaatcgtattatgcgtccgtcgagtgcatggagcgcggtcttgacccgatgacgaccaatctggtcgtagcagatcttagccgcacggagaaaaccatttgtctcgcggtatcgccttctctgaaggcatacggtatttccggcagagcacggctctttgaagtggtcgagcgcgtcaaggaggtcaacgccgaacgtcggcgcaaagcaggcggcaatctttttgaaaagagctgcgatgcccatgagctggcagttgacccgtcacgcgcggttggctatcttgtcgcgccgccgcagatggcgaaatacattcagatcagcacgcagatctacaatgtctatctcaaatacatcgcgcccgaggacatccacgtctactccatcgacgaggtgatgatggatgtgaccagctacctcgagacgtatcatatgaccgcccgcgagctggcgaagaccatgatcctcgatgtgctgcgcaccacgggcatcacggccacggcgggcatcggcagaaatctctatctctgcaaggtcgctatggacattatggcgaagcatgtgcagccggacaaagatggcgtccgcattgcggagcttgacgagatgagctaccgtgagcagctttgggcgcaccgcccgctgacagatttctggcgtgttgggcgcggttatgcaaagaagctggaagccatcggcatctacaccatgggcgatgttgcaagatgctccatcggcaagccgaacgaatactataatgaagaactgctctatcggatgttcggcatcaacgctgagctcctcatcgaccacgcatggggctgggagccgtgccgtatgcaggatatcaaggcataccggccggaaacgaacagcgtctgctctggacaggttctccaatgcccgtattcctttgagaaagcacggttggttgtacgggagatggcggaggccgtcgcgctggatctgttggaaaagaaactggtaacggatcagctgaccctgacagtgggatacgacattgaaaacaccgcaggcggcagctaccacggcgagaccgtgacagaccgctatggcaggaagatccccaagcacacccacggaacagcaaatctgccgagaaaaacatcttcggcccggagcatcacggacgccgttcttggcgtttatgatacaaaggtcaatccgaagctgtctattcggagacttactatcaccgccaatcggctggtgggcgaagatacggtacagcaggagtcggaagccccggtacagttcaacctgttcgataatatcgaggtacaggagcaacggctgcgggaggaaacggctcagttggagcgggagcgtaaaattcaggaagccatgctcgacattaaaaagaagttcggcaaaaacgccattttgaatggcggaagctatctggatggtgccaccgccaaagaacggaataagcagattggagggcataaggcttgagcggaaaatatgaagacattatccatttgccccatccggattcgccaaaacatccgcgaatgtccctccatgaccgtgcggcgcagttctctccctttgccgctttgactggtcacagcgccgccattgcggaaaccgggcggctgacggatcagcgtgtagaaatggacgaatatgaaatggcgcgagtggacgcggaattgcagcgcctccaggagctgcttcccggcgggcccactgcgtccatcacctactttgtgcaggatgaacggaagaacggcggcagctaccaaactgtcaccagatcggtcaagcggatcgatgcagtcagcggtatgatccagatgacagaccggcagctcattcccattgcggatgttttcagcattgagatcatcccataaaaaagaaatatcataacgaaaactcccaaacccgttcattatagagcaggcttgggagttttcattataactgaaatcaaattacagaaggaggagacagaatgaatccaaacgcagattatctcggcatcgttaccatgcttcgcagcctgcgggagcagggactggtcagcggcagtgaagcaaaaaagatcgccgcgcgactgatggtacagcttggcgcggacatcattatttctctttgatttttcacttttaggtatagctattgcggatgcttcatggtattgtgtgttgctgacaggaggtgacagcaaatgagcggcaaggagaaaaccaacggttctctggccatggccccgcgggtcattacgattcctgcagcaagtcaagaaaacaccagaaagctccgcgtggcggcatacgcccgcgtcagctccaactccgaggatcagaagcactcctttgccgcacagaacgcctactactccaagctcatcacaggcaaccccgattgggaactggcagacatttacgcagatcagggcatcaccggcacatccatagacaagcgggatgactttctgcggatgatggaggactgccggaaagggcgtattgaccgcatccttgtgaagtcctcctcacgttttgctcgcaataccaaagagagtctggaagcggtgcgagaattggctgcgctgggcgtcagcgtctacttcgaggaacaggacatcgacaccgcgcaggtatccggagaagttcttatcgccatgttcgcagcattggctcaacgggaaagtgaagctatctccgagcgaatgcggtggagttaccggactcgaatcgacaagggcagattttccaccaataaagcaccgtttggttacatgctggcagatggacgattggaaatcaacacggaagaagcagaagttgtcaaagaaatttttgatatgtccttgcaaggagagagcatctcggatatagcaaagagagtcagtaaaatggatatccctacgagagataagacttcgtattggcaggagagttctatcctgtatattctccataatgaaaaatacgcaggggactgcttactgcaaaaaacatatacggcgcaagaactgccgagatttagaaaacgaaatctcggtaagtatcggcaggtctttgtaaagcaatctcatccggctattatagagcgcgaaaagttcgaaagggttcaggaactgctaaaaagaaaaagaatagcatttgctggtgatagcgtgtcaacaccgttcagcaaaaagataaagtgtgcggaatgcggttccacatttcggcttaaaaaagtacgagggaagaactactggacatgcatggcacacgagaaagatgtacataagtgcagtatgctgccgcttccggaggaacaggtattgcaggcgttccttcgactgtactacaaactcaaatactacggtataggagtacttacacaactcatctctgacttccacgctgccaaaaccggcagccttctctggagcgaaaacatcgtggagattaacaaacaaatatcagatattgccagtcaggaacgacttttgacccagctcaagcagcagggcagcgtcgatcctgacatttttatatcccgcggcaatctgcttgcggagcgccgccgggaactaaagctccaaaaggaacgcatcctgcggtctgaggaggatcataccatccagcaaacacaagacctactggatgttctcgaaagcggaccggactggctggatgacttcgatgagcagctattcagcgacctggtcgagaaaatcgtggtcgtggacaatgaaaaactgtgcttccggcttctcaacgggttggaggtcacagaaaaaatagaaaggacgcaaagataatgggaaatcgaaaacagccatttggctacaagatggggtttggcgagatcgtgccgcagccgcaggaggcagaaacgatacggagcatctacctgcaataccttgccggagcttccttcaagcagcttaccgagcagcttcaggcggaggatgttccctacgatgtggacaagccttggaacaaaaatatggtagcacggattttagaggatgaccgatacattggtgagaagtattttcctgcgctcatcccgacggagcaattccacgctgcccaggaacgcagaaaagagatgcgccctgagtataagcagacacctgcgcaaaaggagttgcgcaagctgtgcggcggcatcgtacccgacagcgtagcacgaagagtcctcaagatactgaatcaggtggtcgatgatccgcagctcattaagatagaatcatccggtgttcccaccacggaagacatcaggcaacgccggctggaactggacaagttgctgcagacacctcctgtggatgaagaaatcgcacgccaaaaggcaatggagttggcggtactgacccttgtgagcgtggagatggaggaatacgaagcccgccggctccgcagcatcttcgggaagcaggcaaagatgcgggaactggatgcgaaccttctgcggcagaatgtccggaaaatcacttatggcagtaagacggtcaaagtcctgctgaaaaataatcaagtcttagaggagtgtgatgatgcatgacgcagacccgccctgaaccgaaggtcattatcatccctgcaaaggaggaatcgccgcaggatcaggaaaagaagaaaaatctccgggtagctgcatactgccgtgtgtccaccaaaaaagatgaacagcttggcagctatgaaaaccagaaagcatactacacggaaaagatcatggcaaatcccaactggacgatggcggatatcttcgcggatgagggtatcaccggtacctccgcctgcaagcgcaagaattttcttcgcatgatccggcagtgcaggaagggcaagatcgacatgattcttgccaaatcggtatcccgcttcgcccgcaacaccgtggacactctgagctatacccgcgagctgcgcagcatgggcatcccggtcatcttcgaggagcagaatatcaactccatctacccggagagcgaattcctcatcaccatccacggcgccttcgcacagtccgaaagcgaagggatatcctcccgcgtcaagtggggcaagcatcaggcgatgcggacgggaaaggcaaacatccagtataagaccctgctggggtacgaaaaaggacctgacggagagatggtggtcaacgcagagcaggcagagactgtccgaaagatttacgagctgtacctatccggtcagacgctgcgcaatatcaaggaaaccttggaaacaggcggattcaagaattcggcaggaacgacggaatggacaacctccaatctgcggacgatcctctctgatgaaaaatactgcggtgatgtcctgctccaaaagaccttcattcgagactgcatcagcaagcaggtcatccgtaatactggacagcttcccatgtatctgattcagaaccaccacgaggccatcatctctcgggaacagttcgatgcggttcagatagaactggcgcggcgtcgggcccagaccggcggcacgaaaaaaagcgctcccacaggtatgagccgctacagcggcaagtacgcgctcagtgggctgctgttctgtggcgagtgcggtacggcgtaccgcagagtggtgtggacacagcacggtgagaaacgagccgtgtggcgctgcagtagccgcttggactatggcaagaaatactgcaaagaatctccgacgctggacgaatcgccgcttcagcaggcggtgctggcagccatcaatgcatccatgtcagggtgcaaggtgctggcagatcagcttgtagacgcaatggagcaggaattggctccggttcccggtgagagcatgagccttggagatatcgaccgagcggtcacagagttgggcaaacaattcgatacgcttctggcagaagcggcaaatggtgacgcggacgaatacgccgagcgctttcgtaccatctccaccacgatggaggaactgaagcgccgcaaggcggcaatcctcagtatccggcaggaacaggaacagatcagccgtcgtatccatgcggcagcctcggcaatgaccgcggcgactgtgggaatcacagagtgggatgatggtgtggtctatcagctactggaaaaggtcaccgtcctgtcccgagagcgcatccgtgtgacgctgcgggacggactggaaattgaacaggctgtagaacagccaaaaaggaggaaattcgcatgatttatgtgactggcgattgccacggaaacttccggcgtttccaatcggattgtttcccggagcaagcgaacatgacgaaggatgacacggtcatcatcaccggcgacttcggcggcgtgtggtttggtgacagccgcgacgatgaaacgctggattggctggaacgcctgcccttcacgcttgccttcgtctgcggcaaccatgaaaactatgacgcgctggaacgatatcccgtagcggagtggcacggcggcaaggtacaccgcattcgtcctcatgtgctgcacctgatgcgcggtcagatcttcgagctggaaggataccgcttcttcaccatgggcggcgcaaaaagccacgacatcgaggatgggattttggagccggatgccccggattttgagcgaaggctcacgatgctccagcgcaaaccaagagcgagataccgcatcaaccacatttcctagtgggcgcaggagctgccaaccgatgaggaatacgccgaggcgcggcgaagccttgatgcggtcggctggcaggtggactacatcatcacacactgcgcccccaccagcattgccctcatggagacccgtcacaacgaggcagatcggctcacggacttcctgcaagatgtacgggaaagagcagaataccactactggctgttcggccactatcatgacaacaaagccgttgatgaaaagcacatcctgctgtgggagcagatcgtgcagatctgctaagatctggtggaaaaggcagtaaaggaaagagcggtacagcgccgctttttcctttgcggctttgcagcagagtagaaaaaccgagtaacggcttgcaagttgagcggatctgttggaaaagtagaagaatgctttcgatgcttccttttgatagactgtagatccgtggcctgatatactggaagcaacaaaagaacaggagcgaataaagatatggatacgttaatggaactcagcattcaaggagacatcttctttttctatgatatattgtcagaggaagaaaaggaaaccgttcgcaagtgcatgagggcgaggtataaaggccatatagtaggcgaccctaaaatcgatgaatttttagaagaactcgagcgtgatcatggcattcggttgaagaggctgccggtaacgagcgtcattgcggtgtaagagcaaaaccgctttccttcaagttcctgtagactttctctgccgacgtgctatcatactaaatgcttggcttaggcagtaagacgaatatctacaagatttgcagaaaggtgactctatgaaaaaacaaattcaagccgcggcgcttgcgctatgcacccttatgctctttgccgcggctaccggctgtggcaagcaggaaaaaccgaccacagagcagcccgcgctggagacggtggaatactccaacctgaccgatgatgattcccgcaaacagctttcacagcttctctcggatgcgggaatcgaagaattccgcatcaccgctctgatggatcgggtggaacagtttaacgccagtgtcaagagcgagtggctgaccgatggcttcgagagcgccgcgccgaccgacaccaagtatgatccctatgagatgcaggatgaatggacggcggcaaacggcagctttcccggttataactgccgcattacagcatttggcctgttcagcgaattcatcacagcaggagccgaccagccggaggtacagggcgaggattccctctttactgatctggaaaccatttccgccgatcctgacgcgctctgcggggacagcaccgccaaattctgtgcgctgttcgcaccggtgaatgccgtggacagcacggaggtcgaagcacaggtcaaagcgcttcaggagggctgggcagcccgtggtatcacatttacagacagcaaaacaagcatgatctcggtcatcttccacgataaattctcggacgaggacaacacgctgttcgttggtcatgtcggcgtgctgctgcctgcggaggacggttcactgtacttcatcgaaaaggtggcgttccaggaaccataccgtttagtgaagctccaaaaccgcacggaattgagcgactacctgatggagaaatacgatacttcctggggccaggatacgacgcgccccttcatcatggagaacgatacgctgatggacggataccgaccgaaccctctggaggcaacaaatccttaaaattgaaacagcagcgggatggcattgtcattccgctgcttctattttacagaaaaggcgcaccgcgccggaaaggagaaagcccatgaatatccgtaaacccacagactacagcaccatgttttctgaattggacaagcttatgacagcacagccttcacagatggaattgtactgcgaaattggccggctggtcagcggcaggagcgaaaaaggcgcggctgtcgcggcgtcggaatacctgcaagcggcctatcctgcgaccgagggcttttctccccgcaatgtgcgccggatgcgcgcgttttacgcagcctacgaggaatcccctgaaatcatgcggctggcgatgtacctcggctggacgcggaatgtggcgattttagagaggtgcggcagcaacgaggaacggacgtggtacatccgagccgtgctgcacttcggctggaagaaagcaaaactgctggccgccatagaatctcaggcgtggcagcattcttctctcgacgaacaggcgttttcctgctatactggtgaaaaagaagcaacgcgggagagcaaatgcaatgaaaaagatactctttgtgtgtcatggaaatatctgccgcagcccaatggcggaattcgtgatgaaggacttggtcaaaaaagctgggctgacgtcacagttccatatcgaatcggcagccaccagccgggaggagatcggcaacccggtctatcctccggcgcggcgcaagctggcggagcatgggatctcctgcgacggtcacgtagcacggcagctcaccaatgccgattacgagaagtacgacctgctgatcggcatggacagagccaacctccgggatatgcaccgtatctgcggcggcgatttctctggcaagctgcacctcctgatggactacaccgaccatccccacgatgttgccgacccgtggtacaccgaagacttcgaatcgacttggcaagatgtgctggcggggtgtcagggcttgctgagagaattattgcaggagcgaggtgaacagaatggataacgaacttcaaacgaactatacaacagagcagacctatcattcaatccgccattccattgtgtctgcacagcgcagtttgagtgtggcagtaaactccgcaatggtgacggcctattgggaaatcggcgagcagatttgcaaagcttgcggagaaaatgaccgcgcaggatatggcaaaaagctgctgcagtacctgtccgcacatctgacagcggaatttgggaaaggatttgacgagtcaaatttgcgaaaaatgcgtcagttctactgcgcatatccaattcgagacacactgtgtcctgaattgagctggtcgcactaccgactactgatgcgggttcccaatgagaaagagagagccttctatgcggaagaatgcgcgaagtccgcatggagcgtccggcagcttgaacggcagatccacacgatgtactatcagcgcatcttggcaagccaggataaatcacttgttgctgctgagatacaaacaacggagccaaaaccggaatatgaaaaaatcatcaaagacccctatgtaatggagttcctgcaaatccaaccggatacgcatgtgtatgagggagaattggagcaggcattgattgatcacctgcaacacttcctgctggagctgggacgaggcttctccttcgtagcccgacagaagaagtttacgctggatggtcagaactttttcattgaccttgtgttttacaattatatcctcaagtgctttgtgctaatcgatctgaagatgggtcagcttacgcatcaggatctcggtcagatgcagatgtatgtcaactactacactcgtgagttgatgaacgaaggggacacaccgccgattggcattgtcctctgcgccgataaaagtgatgctgttgtgaagtacactttgccagaggataatcaccagattttcgcatccaaatatttcacctatctgccgacagaagaagaactgaagcgagaattgcggctggatgagttccaaaagctggacgagtaatacttgtgttaaattcggacgggggttcgaattgtgtcagtagtacttcaaaaaaattgcgagtattttttgttggaaatttgcaagccgttgcagtgcaaggcttccaaggcgaaaatatccgaattgaagccacctgacatgatctgaaggactcatctgtcagcaggttttccgctttcccaccaaggtcggcgacgacagaatgaaaatgcagatcgtgaagagcgagtggaacgaaacggtacggtacggtgagataagaatggcctcaagtacatcggtgtctccggctgaccgaagcgtatgttgtcgataggcagccgacaggaaaacgtgaaaccaacgtatcgtttgaggtgggtttgacgataactggaccggtggttgcaaacagcgggggcggatggtatactctgtgtcagagcgcagcccgcactatgggaactgtatccgatcatagtctcacggtgtttagcggcggtgcctgcctgtatgtgaagatgaaaggacggtgacagtggtgtatttcgaatacggggaaacagagctttcttatctgcggcagaaagacaggcggcttggtgaagtcattgaccgtattggatatatcgaccgtgccgtggatacggacttgttctctgccattgtccatcatatcatcggccagcagatatcgactaaggcgcaggcgaccatctggcagcggatgcgggatgcgctgggtgaggtgaacgcggagagcatccttgcggcgggagtccctgaactgcaagccctgggtatgaccttccgtaaggcggaatacatcacagatctggcgcaaaaggcccgggacggtgcgtttgatctggacggcatatggcagaaaacggacggggaggcgatccgcgaactgagcagtctgaagggtgttggcatctggacggcggagatgatcctgctgttctgtatgcagcggcccgatgtgtttagttacgacgatctggctattcagcgcggactgcggatgctctatcaccaccgcagcattgaccgtaagcggtttgagatgtaccgccgtcggtttagcccgtatggcagcgtggcgagcctgtatctgtgggcggtggccggtggagcgataccggagttgaaagatcataagccgaaaaaaagaatggagggaaagagatgatctggacatccgagtatatgtcgccgctgggtacgatcacgctggcctgcgacgatgaggcgctcgttggtctgtggttcaacgggcagaggtattttggtagcgttctgccagaagtgactgcacaaagggaacacccgctgtttgcagaggccggtcactggctggatatctatttttccggtaaggaaccggggtttctgccgccgctgcgctatgataccacaccgttccgtaagcgtatctgtgacatcatgctgacgataccgtatggaaagaccatgacctacggagagatcgccgctgaagcggctcgccagcaggggctggccaaaatgtccgcgcaggcggtaggcggcgcggtggggcataacccgatctctctcatgatcccgtgccaccgcgtggtgggtacaaacggcagccttaccggctatggcggtggcatccaaaggaaaaaagcattgctggagctggagcgtgccgatatgcatggcttgttcgtaccgaagaaggggaccgcgctttgatcgggtctcgcttcctgtgaggcctgagaatatacgcacgtccggcctgactgggccggacgtgtgtttttgttttttctgcggcggtatttggcaaaaaaaggtgagaaaagagcagacagcgtcttgaagacaggcggcgggactgccatcatgatcgacgccggctataactacgaacggctggcggagaagatggcatggccgggtattgcaccgcagtccattcggcacattctcattacccatcaggatactgactggaaaacaagccgttttcgccgttgccggaaacgctgcaaaggcatacgcggctcagccgtgaccctcggcagcgatcatgtgcagtgcgttctccagtgcgccgataacggcggaggtatggctcacaaaagctcctccgtttttcgatagcccagcgcagtggagatcatggacgcggtggcgcagacctgctccaccgccgcaaggaattcatcggaacgggtgctgcggaacataccgatcacgccaacggtgtatcgtgctttgccctccacggtatagaccggtgcggaaatggagcgcaggccgatcttgtattcgccgttttcaatggcgtagccgtcggtacggcacagatcgatctcctgcatcagcgcggtcagatcggtgatggtgtgcggggtgaactgggtcatatgctgcgcgcgcagcagcgcctcggcactggtgcgggacatatgtgccagaaagaccttgccctgcgacgtacagtagattggcagccgggaacctatatccgacacgacgcgcagattgtcccgggtctccacctgatccagcgtgatcacgctgccgccctcacacaccgagagcataacggacgccccggtccgctggcacaggtgctccatataggggcgggccaccagtgagatgtcccaggaccgctccacttgccgcccatattcgaacagccgcaggcccagcgtgtattttccgtccggcgtctgcgctgccacgtcataggcccgcatggtggtcagcaggccgaatacggtgctctttgggtatccgcaccgggtggccagttccttcagcgacagcggactttcggcctgactcagaatttgcaggacctccatggccttcgccacggataatatgatatttccgtccatcatggtgccgcacctcccgttgctatcagcataccggcttcgttattctctgtcaagaacgatctgagaaagctgacacaaagtaagagaaaacctccggaaacggaggctttttctgcgcagttgaagaacagcgggaaggccatgaaaacagagaggtacttgcggaaacggtcatgctacgctataatacaaggcgatccaaggagaaccatttgtagtttccggggtggacagaagcctataaggaggaccttgtaccatggagaaaaagctgactcatagtaagtggtttttatacctgacagagtttttcgcgggaatgtccgtcatggcggtggagttaggcgccagccgtctgatggcgccgtacttcagctcatctcaaatcgtttggacggtcattatcggcgttataatgatcgccatggctgtgggcaacatctggggcggacggatggctgacaagagcaagtcgccggaccgactctatggccgggtcatcatcgccgcgatctggatcgcgttgataccctttgcgggccgatggatgatcgccgggatatccttcctgctggccacgttcgtaacgaagaactttctggtctgggcggcgctggcagcctgcctggtgatcttcgccttcccctgtgtgctgctgggcaccgtaacaccgtccctgaccaagttcaccgtggacaatttggatgacaccggcaggaccgtggggcagctgaatgcgctgaacaccatcggcagcatcatcggcacctttgtgcccacgttcctgaccatcccggcggtgggtacggcggccacattcctgatctttgcgggtgtgctggccgctatcggtattgtctacttcacttttgaacggaagaagacggtcgccggtattattgcggtggtgttggtggcggggttgtgctttgcgctgcccacctacagcttcgcattctgggagagcgacctggccctggaggacgagtccatctacaactacctccaggtcaaggatgatgaccacaccaccacgctctccaccaatgtgctcttcggtgtacagtcggtgcagaacaaggacggtaagctcaccggaatgtactacgactacgcgctggcagccccctgtatggcgggtatggacggtaccgataacacaggccgcagcgccatgatcttgggcatggggtccggcacctacgccggatactgcgtccgctatttcccgggcatgaccgtgcagggcgcggagatcgacggcaagatcgccgatatcgcccgcacctattttggcctgccggaggaggtggaggtggctgtagccgatggccgggcctacctgaccgcgtcggagaaaaagtttgatgtgattatggtggatgcctatcaggacatcaccattccgtttcagctgtccagccgggagttcttcgcggcggtggcggagcatctgaagccggagggcgtcatggtggtgaacctgaacatgacctcccgggaggatggctccatcaaccagtacctctgtgatacgatggccagcgtgttcgcgtacacctatctggccgatgtgcccggaaacaccaatacggaggtgttctgcaccaacgcgcccggcctgccagagcgctttgcagccagccgcgcagcgctgaccgacggagactacgccgccatgatggcggaggtggccgccgatctgacggtctacaccggtggggactgccttctgacggacgacagggcgccggtggaggtgctgggtatgcgtgtgctggatgagctgatcgccggagaactggactattaccgggagaatttcagcctgcaggagatactgggaatgctgggctgacggcggcgcttgacaagccccgccgccggggctatgatagccgtgccgtccatctgcccggcggccgaaacgaggaaatgaggaattgctatggacgcagttgttcttgaccatgtggataaaacctataccacctacagcacggatatcgtcctgaccggcgagacgcggcccagccgtacccgacaggtgctgcgcggcctgtcgctgaccattcccgccggagagatcaccgtgatcgtgggccgcagcggctgcggcaagagcacgctgctgaagctgctggcagggacagagacgcctgacaccgggacgatacggattccggagggctggcacagtgccatgctcagcccggatccctatgtcatcacctggaccagcgtgcagcggaacgtggccatggcctgcggcgtggggaaaacaccggaggagcgctatgagcgcgccagcgaattcgtacggctggtgggcttggaggactacgccgacctgacgccggcagagctgtccaccggtatgaagcagcgtctgggcctggcccgggtgctggcggggcaggcggaactgctgctgatggatgagccctttgcctccctggactttttgacccgcgcagagctgcagagccaactcctggccattcaggagaagctgccccgcacgatcgtgctggtcacccaccagctggaggaggcgctgctgctggggcggcgaatcattgtcatgcacccggacagtacgatctgtgaatttgatctgacggatctgccctatccccgggatctggacgatccgacgctgcggcggctgaagaaggccgttaccgaccaatgccgctataccgcataagaagcggcgatgcacactataattgctgtaccatacctgcggcctgtgccgctgaaaggagactgttatgctttccggactgacgcaatatgtgcccgaagcgaccctgactgtttacgacaatctggaatttctcattcgcctgctgctgtctgccgccttgggcgcgctggtgggtttggagcgcagtaagcgccgcaaggaggcgggcatccgtacccactgcatcattgcctgtacctccgcactgtttatgatcgtctcaaaatacgctttcctggattgtgttacgctggatggtcttcgcggcgcagaccctgcacgcattgccgcccaggtggtcagcggcatatcctttctgggggccggcgttatattcaaaaacggcaactctatccgcggactgactaccgccgccggtatgtggggtaccgccgccatcggtatggctgtgggtgccggtatgtattggctgggcctgttcgaggcggctgtcctcgttgctatccagattattctccaccgcttccctgtgggggcggatgccctcacgacccaggagcttctggtggagctggaggatacggatgagctgcgggcccgctttgacgatctgctgaaggagcaccgcggccaggtgacagagagcagcctcacccgtcaggacggctgccttcgtatggagatcaccgtccggcttgagccgccgatcacccatgatgaagcactggcctttatgcgggagaaccccggtgtgaaaagaatgtctgtataagcgacgcatgaaaagccggccaccaggccggctttttcatgcgcagttgcggttttcactggagtttgctatactctgtgtgagaagggagatgtttctgtgctgcatactgttatggcgttcctgccgttggcgtttttgatcgtatatgccctaaagaccagaaaaatggcggatgcaatggtcctggccactctgctggccgtgctgctggtccatcgccagcattttttcactgggctgatcgacgccatgtatactacactgggcaacagctcctatcagtttgcactgtgcagtattctgggctttggcggaatgatctcgctgtttcaggcctccggcgggctcatgggcttccgggatctgctggcgaaggcggccaacacgccccgcaaaacgctgctgctggcgtggctgctgtctgtgatcatgttcgtggacgagtacctgaatgccctgactaccaccatctgcctgcggggtgtctccgataaaaaccgtctgccccgggagcacctggcggtgcagaccaacattatggcatgctgcctgtgcgtgacggtgccctttaccagctggacggcattcagcgtgggcctgatctccgacttcggcctggggttcacggattaccttcaggcggtgcccttcatgttttatccgctggcgatgatgctggtaagtctgctgctggcgttgggctggtttccgaaagtgggcatgcttcgtcaggcgtatcaccgggtggcctccggcggcgcagcctttgagccgggagaaaaggacgagaagcttgtggacattgacgaggtggatgagcacaatgtctcctcggcttggaacgctattatcccgctggcggcgctggtgggcggcacggtgctgtttgacaatgatttgctccacggtatcatcgtgtgcctggtggtgcagttcttgctgtatgtgatacagaagcgtatgacggtgggagaatactttgcccgattcttttccggcgttaagggtatgaccaccattgctgtggtggtgggctttggcctgatgctcagcgacgccaaccgtacgttggggttgtttgatattctcatcaacggtatcggaggggcggtgccccgctgcctgatcgcgccgctggcgtttgtgctggtgggattgaccgtatttgccgtaggtggctgctgggcggtaatgaccatcgctattcctgtgttcatcccgatgggactggctgccggggtggctgcgccgctgatgatcgccgcggtgatgagtggcgttaccctgggatatagtctgtgcttctatgcggacacggtgctgatgaccaccgccggctcgggcgtttccaacctgaccaccatacgggcggcaacgccctatgcgctggcggtggggggcctttcggtgatagcgctgttggtggccgggctgtgaaaacggtggctgggttgtgaaagcagcgggcggaaacagtaacatttttgatagaaaaccggtggtttacagggcggggaaatcgtggtacactatgtgggaccggcgtttgacacgccggaaaagcgcgtgctttttgtgcgctttcgctgtacacttatggtacattcatgatacatttacgatacctttgttatacattctctttcgctttttgcgggcttgatgcgctgtatgtggccgcagaggaacggatatgtgcgccgtgcgggggaaatgcgagggaagggaggtgccgctatgctgcgacggatacgggagctttttaacgacgtgttccgacaggccgatcttgtcctgctggcgctgtgcatcggcacgtcgctgttcggcatactgatgatcgccagcgccacacgctatatgcacaccagcaagctggtgctggtacaggcggcggcgctgtgcatcggggcggtgctgtatatcgtggtgtcgcaggtggacctgaacgagctggcgaagtactggaagtggatattcctggtgggcgtggtgttcatcctgctgctggcaacgcccctcggtattgccggggataccggcaacaaggcatggctggagttcccgttcctgccggtgaaggtgcagccggcggagatcgtgaagctgacgtttattatcgtgctggcgaaacagctctcgtggctgaaggagaaccgggacctgcggtcgatttcctccatcgtcatgctggcggcacacttcggcgtgatctttgcgctgtactacaagatatcctccgacatgggcagtgcgctggtgttcctgttcatcttcgcgtgtatgtgttttgtggcgggggtggcgctgcggtggttcctgatcggcggcggcgcggcgggactgctgttctacgccatgtgggacctggacctgctggatacctacatgaaaaaccggttcatcgtcctgttcgaccacagctatgacccgctgaacaccggctggcagcagacccggagcctgctgacactgggcggcggaaggatattcgggcaggggctgtttcgcggcacgcagacccaaagcgaggcggcgtccagcctgccgcaccggcacacggattttattttctccgtgatcggtgaggagctggggctggtgggttgcctgctgacgctggcgctgctgacggccattatactgcggtgcctgtatgtggcgcggcacgccaagacccggctggagggctatgcctgcatcggcgtggccagtgtcattatctttcaggtcatcatcaatgtgggtatgtgcctgttcgtgatgccggtcatcggactgacgctgcccttcatcagctacggcggctcatcgctggtgatgctgtttgcctgtatggggctggtgtccggcgtacacgggcgggcgaagcccgactggctgcgataggaaagacaacaaaagaacgccgcggctgtgccggggcgttctttgtttgtttacacaccagcgggcaaaatcggttgtaatcagcggggcgctgtgctataataatatatcaaatcatgggggcacagggccgtttttcgctgtgccgcctaaaagtgagggtacgcttatgaagatcgtggtattggcgggcggactgtccacagagcgccaggtggcgctgaccagcggcaccggcgtgtgcagggcgctgcgggagaggggacacaaggccattctggtggatatgtttttggggttggaggactacgagggcgcgttggaggatatctttgacgcgccggacggcctgtgcggccagagccgggtggagcgcgtggagccggacctggaggcggtgcgccgcagccggagggaccagagccccagcctgctgggcaaggacgtgctgaccgtgtgccgcatggcggacgtggtatttctggcgctgcacggaagctgcggcgaggacggccgcatacaggccacgctggatctgctgggcgtgccctacaccggatccgggtatctgggcagcggcatggccatggataaatccgtgacgaagcggatgatggactctctcggtattcgcacggctccgtggcacgacatccactataccgagagcgatatcccccggctggcggaggagctgccggtgccctgtgccgtgaagatcgtcaacggcggcagctccatcggtgtggcgctgccggacacgaaggaacagctggagaaggccctgcgcgacctgctgcgctacggcgaccatgtggtggtggagcagaagatcaagggtcgggagatacagatcgccgtgctgggcgacggctatctgccggcggtggagatcatccccaagggcgcctatttcgactatgagagcaagtatcaggccggcggcgcggtggagctgtgccccgcgcctatcacggacgcggcgtggaagcaggtgggcgagatggccctgaagctgcacaaggggctggggctgagcgtgtactcccgttcggacttcattctggacgagaacggtcaggcctggtgcctggagatcaacaccctgccgggcatgacgcctaccagtctggtgccccaggaggcggcgcaggtgggactgaactacggcgaattgtgcgagaagatcgtggagctgtcgctgacggcgcgaaaggcggcgcgggcatgatgccgctgacggtacagaccatctgcgccgcggtgggcggcacggtgctgcagagcagcggcgcggcggtgcgcgacgtgaccaccgacagccgccgcgtgccgcaggaagcgctgttcatccctctggtgggggaacgcttcgacggccacgcctatatcgaaaaggcgctggaggccggggcggcgggatgcctgacggcaaagacgccggaggcgctgctgccggggaagttttacattcaggtgcccgacacgcggctggcgctgaaggcgctggccgcctggtaccgggggcagttccggctgccggtggtacaggtgaccggctccgtgggcaagacgaccaccaaggagatgatcgccgcagtgctgacgcagaaatacgagacgctgcggacggaggggaacctcaacaacgacatcggcgcgccgctgacgctgctgcggctcatgccggagcacgaggcggcggtgatcgagacgggcatgaaccactttggggagatacggtatctgggcgagatggtacggccggatatcgccgttatcaccaacgtgggcgacgcccacatcgaaaatctgggcaacacacggcagggcattttgcaggccaagtgtgagatatttgaaaatctgaccccggagggcgtcgcggtgctcaacggcgacgacgagctgctgaacacggtgacgctgccacagagcatcctgcgctgcggcgagggcgagcactgcgaggtccgcgttacggacatcgacgaccgggggctggagggcgtggcctgcaccgtgaccacgggacaggcggcctatcggctggagacggcggcgccggggcggcacatggtctatcccatggccatggcggcagccatcggcgagcggctgggcctgacggcggcggagatcgccgcggggacggcggcctatgcgccggtggggagccggatgcacctgatccgtatggacggggatcggctggtcatcgacgactgctacaacgccaatccgcagtccatggcggagggcatccgtatgctggctgccagccggcagaaaaagcgcctggcggtgctgggcgacatgggtgagttgggtgcgctgacggcccaggcccaccgggatatggggacgctgtgccgggagttgggcatcgagaccgtggcggtgggggagaagatgagatccctgaccgagaccgaccccgacgcccggtggtttgccaccgtggaggaggccatgcccgctgtacgggcgcggttcaccccggggacggcggtgctggtgaaggcgtcccgcgccatgcattttgagaacatcgtaaaggaattagagaaagagtaaatggtcgacattcgcgttacagggctggtgaagtcctttgatctggaaaagagaatactggacggactgagctttcaggtggacagcggggagcgcgtgggactgctggggcggaacggcgccgggaagaccacggtgttccgtatgctcaccggggagctggagccggacgagggagaggtacagatcgccgccggacggcgggtgggactgatctcgcagatccccgtgtatccggaggggtacacggtggaggacgttttgcagacggccttcgcgcggatgtttcggatgaaggacgagatggatgcgctggccctgcggatggagcagggggacagcggcgcggatacgctgcggcggtacggtgagctgaacgccaaattcgagggactgggcggctgggacacggagacggcggtgaacagggtggccaacggcctgagcatcccgagggaaatgcggcagcgggaattcgcgtgtttgtccggcggagagaagacccgggtgaacctgggacggctcattctggaggatacggacatcctgctgctggacgagcccacgaaccatctggacctgcaggccacggagtggctggaggggtatctgcggaggttccggggcacggtgctgaccatcagccatgaccggtatttcctggaccggaccgtgacgcggatcatcgagatacaggacggaaaagcggagttttacagcggaaattacagcttttatgccatcgagaaggaacggcggtatcaggagcgcatgaagcagtacctgaaggagcaggcgaagatcgcgcagctggaaaaggcggcggagcagatgcacctgtgggccttcatgggcaacgacgcgctgcacaagcgggccttcagcatggagaagcgcatcgagcgtatgcggaccacggagaagcccacaaaggcgcggaagctggaggcgcgcttccagagccgggagttcaagggcgacgaggtattgcagatcaagggcgtcagcaaggccttcggcgagaagcggctgtttgaggatgtgtatctgcggtgcgaggggggcgagcgcatcgctctgctgggcgagaacggcacgggaaagaccacgctgctgaatatgctgaccggcagcgaacgcccggacagcggcgttatacggctggggccggcggtgaaggcggcgtatctgccgcaggtgatacacttcgagcacccggagaggtccatactggacacgatgctctatgagctggacatcacgccgcagtcggcgcggaaccggctggcggcgtatcagttcaccggagaggatgtgttcaagagcgtcagcgtgctgtccggcggcgagctgagccgcctgcggctgtgtatgctgatggacgagagcatcaatctgctgatattggacgagccgacgaaccatctggatatcgactcgagggagtggctggagcaggcggtggaggccttcgacgggacgctgctgttcgtgagccacgaccggtatttcatcaaccggttcgccacccgcgtgtgggagctggccgagggcgtcatcacggactatcccatgggctttgcacagtaccggcaggccaaggaggaggaacgcgccgccgcggcggccgcggtacaggcgcagtccgctgcgccgaaaaagaacggcagccggggcaaccgggcccagcaggcggcgaaaaagcagctgaccatctgcgagacggctatcgccaggctggaggcggacagcgcgcggctggaggcggagatggcggagaatgcctgcgacgcggagaagctgaacgcgctgtatcaggaacagcaggacgtgcagaagcggctggagcaggagatggagcgctgggaagaactgagcttgcaggccgaggaacaggaggagcgataacatgagtgatattttgtgcatttactattcccggaccgggcatacccgccgggcggtcaaggagatcgccgaggcgctgggcgcggagatcacggccatcaccgacgactgcgaccgcagcggctggcggggatatatgcgctgcggcatggacgccatgaagacgtccacccggcccctgcagccctttgagacggagaagccgctgggcgcgtacaaactggtgatcgtgggcagcccggtgtgggcggggcggtgcgccagccccattcgtgcgctgctgaagcggcggggactggagatggaaaacgtggcctacgtggtcacgcggagcaccacccagcgcagtgaggaggtctatgaccagatggatatgtacaccgggcaggcccaccggctggcggtgtcgctgcggccggacagcgaggggtatgagttctggcggaacgactttatccagaatgtgcgccgcctgctggagaacggctgaggacggaccatgcaggagaagctgagcgcccttgcggcgcatttgacagaggtggagcagcagctggcggacccggcggtatatacggaccgggagaagctgacggcgctgcgccgggagcagaaggagctggcaccggtggtggaatgctggcaggcgtatctgcgggcgcaggacaccgcccgggaggcggaggagatgctgtctgacccggagctgcgggctttggcacaggaggagctggctggggcgaagggggatatggagcgcttgcaggaggagctgaagcggctgctgctgccgcgggaccccaatgacgagaagaacgtgatactggagatacgggccggtatcggcggggaggagggtgcactattcgccgccgacctgctgcggatgtacaccatgtacgccgagcgccggggctggacgctgagcatcgtcagtgagaacatgacggagctgggcggcgtgaaggaggtcagcgccgagatcgagggcgcgggcgcctggtcacggctgaaattcgaggctgggacacaccgggtgcagcgggtgccggagacggagtcctccgggcgcatccagacctccgccgccacggtggcggtgatgcccgaggcggaggaggtggagttttccatcgaccccaaggacctgcagatcgacacgttccgttcctccggcgcggggggacagcacgtgaacaagacggagagcgccatacgtatcacccatctgcccacgggcgtggtggtggagtgccaggatgagcgcagccagtataagaacaaggatcgggccatgaagatcctgcgctcgaagctgtacgaggcggagcaggagaagcagaacgccgccatcgccgccacacggaagagccaggtgggcaccggcgacagaagcggcaagatcagaacgtataatttcccgcagaaccgggtcacggatcatcggctgacgggagacaataaaaacttcaacattgcggccatcattaacggtgatctggacggtatgatcgatgcgctgaccctgaacgaccaggcccaacggctgcaggagggaaaggagagttgaccatgaacgagaataagaagaaaatgtatgacctgtccggccccaagacggtggaggctatgaagaagcggcactttgacgcctattactgttccaccgctgccgaggccgtggagaaggcgctggagctgatccccaagacggacagtgtatcctggggcggcgtgatgaccgtggacgagctggggctgaagcagcggctggcgcaggagggctataccctcatcgaccgggataccgctaaggacccggcggagaagcaggcgctgatgcaccaggcgttgaactgcggcacgttcctgatgagcagcaacgccatctccaaggatgggcagctggtgaatatcgacggcatgggcaaccgggtggcggccatgtgctatggaccccggcaggtgttggtcatcgccggtatgaacaaggtgctgggcacgctggacgacgccattgcccgcgcccggaacatcgccgcgccggccaacgcgcagcggttcggtatcaagacgccctgcggcctgaccggacagtgcggtgactgcaccagtccggactgcatctgttcctatgtggtggtgacgaggaactctatggtgcatgagcgtatcaaggtcatcctcgtgggggaggacctggggctgtaaggggatgttttgccgctgcggcggaataaaagagcagaagaaacgaggttcgggtgatggagaccatcatattccatccggaaacggacaaaaacgccatcgcggaggcggcggcgatccttcgccggggtggcctgctggggatccccacggagacggtatacggactgggggccgacgggctcaacgaggacgcggtgcgccgtattttcgaggctaagggacggccacaggacaacccgctgatcctgcacgtgccggacgcgggctggctggagcgctgctgtgcagatatccctgacacggcctatgcgctggcggaacggttctggccggggccgctgaccatgatcctgccccggcgggactgcgtgcccctgcggaccaccggcgggctggatactgtgggcgtccgctgcccggaccatccggtgacgcgggccatcatcgccgcggcgggcacgccggtggccgcccccagcgggaatacctccggccgtcccagccccacctgtgcccgccacatgatggaggacatgatggggaagatcgacggcattgtggatggcggcccctgcgccgtgggggtggagagcaccatcctcgacctgacggtgcagccaccccggctgctgcggcccggcggactgccgctggaggcactggaggcggtgctgggggaggtggccgtggacaaggccgtgcggcagaagctgcccgacggggagaaggccaaggcaccgggaatgaagtaccggcactacgcgccccgggctgccgtgacggtggtgacgggcgcgccgcggcgaagcgcggcgtacatcgcggcgcacctgccggcgggggccggggtcatctgctttgacgagtacgcgccgctgttcgcggggcacattgtacatcggttgggaccggcaggagacaagctggcccaggcacagcgcgtgttcgacgcgctgcggaccttcgacgagacggaggtgacggccatctatgcccagtgcccggacgaggcgggactgggactggcggtgagcaaccggctgaaaaaggcggcggggttccacacggtggacgcgtcgccgctggtcatcggcttcacggggcctaccggcgcgggcaagaccagcgccctgcgggcgctggagcagctgggcgggctggtgctggactgcgacgccatctaccatgagctgctgcggacggacggagcgctgcggggggccatcgccggggcgttcggcccggtgttcgcggcggacggcggtctggaccggcagaagctggggaacctcgtattcggcgatccggcggcgctggagacgctgaacgggatcatctatgcgcggctgccccgggagctgcggcggcggatggacgagagcgacgcggcggtggtgggcatcgacgccatcaacctgatcgaaagcgggctggacggaatgtgtcggcggacggtggcggtgatcgcgccggcggagacgcgggtggcgcgcatcatggcacgggacggcataccggaggcatacgcgcggctgcgggtgcgggcacagaaggacgaagcgttctaccgggcccggtgcacggacgtgctggtgaacgactgcggcagcgcggcggcctttacggaaaaggcacggcgggcgctggagacgatattgaaggaggaacgagcatgagcgaggaaatgaaggcgctgcgggagcagctgctgcggaacgacaagaacgggtatgatacgctgggcgaggcgcagctggcggagatggaggcctactgcgcggactacaaggcgtttctgaacgagggaaagacagaacggctcagcgcccgggcggctatcgccgcggcagaggcgaagggctttgtgcagtataagcgcggcatggcgctgaaggccggggataaggtgtacacctgcaaccggggcaaggggctgatgctggcggtcatcggtaaggagagtctggccgagggcgcgcagatcgcggcggcgcatatcgactcgccgcggctggatctgaagcccacgccgctgtatgaggacagcgagatggcatatttcaagacccactactacggcggtatccgcaagtaccagtgggtgaccatccccctgcagctgcggggcgtggtggccaagaaggacggcagcgtggtagacgtgtgcatcggcgaggcgggcgagccccagctggtcatcacggacctgctgccccatctgggcggcgaacagggccggaagcccctgaacgaggcggtgcccggcgagacgctgaacctgctggtgggcagccggcccatcggggacagcgaggacaaggaccgggtgaagctgcacgtgatgaagcggctgcacgacaagtacggcatcacggagagcgacttcgcctccgcggagctggaggctgttcccgccgcggaggcggtggacatcggtgttgacggcagcatgatcggctcctacggtcacgatgaccgggtgtgcggctacgcggcgctgcgggcgctgctggatatcgaaacgccggacaagacggcggtatgcgtgctggcggacaaggaggagatcggctccatgggcgtgacaggtatgcagtccgcggcctttgacgcctttatgtctgacctgtgcgacggccagaacgtgccgctgaaggcgtgctttgagaacgccttttgcctgtccgccgacgtgacggcggcctatgaccccaactttgccgatgtgtacgagaagaagaacgcggccttcgtcaactacggcgtgggtatctgcaagtacaccggcgcgcggggcaagtccggctcctcggacgccaacgcggagacggtggcctatgtgcgcgcggtgctggacggcgcgggcgtgcggtggcagatctgcgagctgggcaagatcgacgccggcggcggcgggacggtggcacagtatatggccaaccggaacatcgccacgctggacgccggcgtgccggtgctgagcatgcacgcgcccttcgaggtggtggccaaggtggactgctacgagatgtaccgggcctgcaaggcactgtacgaggcgagataacggaaaagcacggtcccaggcagtgcctgggaccgtgctttttacgggaaagatacggaaatcccttgtaaaaagtgggggaatacggtataattttctacaagaacagcaggaagggaggcggcggtatgtacggcatcggtcagcgggtggtgcaccccatgcacggggcgggcgttatcgagaacgtgacggaggagctgctgtacggcgcggcgcggacgtattatgtatttcgccaggccgtcagcggactggtactgaagctgcccactgataactgcgaggccatcggtgtgcggctgctgtatgaccgggagaggatggacgcggtgctctcggccatcccatcgctgacggtggaggaggagcgcaactggaaccgccgctacagggagaacatggcgcggctgaaaagcggcgacctgacggaggtggcacgggtggtcaagtctctgatgcggcgggaggcggcgcggggactgtccaccggagagagaaaaatgctgcacagtgccaaggagatactgctgtcggagctggcgatggtgcgggagatcggataccaagaggcggagcgtctgctggatggcgcggtgatgacgggagcgtgtgagtgacgatggggaagctctttgataagctgttaaaccggaaaaaggaacggcacccccgctgcgcggcgctggtgcctgccgcggggcgctctgagcgcatgggcggaacggataagctgacggcgccgctgtgcggcgtgccggtgctgctgcggacgctgcgggcgctggatgaggcggcgctgatcgacgagatcgtggtggcggtaagcccggagcgactggaggagatcgcggccctgtgtgccggggcgaatgtcaaaacgccgctgcgcgtggtggagggcggcgggagccgcgctcagtcggtgctgctggcggcgctggcggccggcgacagctgcgagctgctggcggtgcatgacggcgcgcggccgctgatcctgccggagcaggtggacgacatggtgcggctgggacagcggacctatgccgccgcgccggcgctgccggtgacagacacggtgaaggtggcggatatggcggggctggtgcagtccacgccggaccggaaaacgctgtacgccgtacagacgccacaggtgtttcaggcgaacatcctgaaggctgctctgcagtcggctattcaggccggggcggacatcacggacgactgctccgccgtggaacggctgggcaaggaggtatggctggcccccggctggcgggagaacatcaagatcaccacgcgggaggacctgaccatggcagaggcattcctgcgggagagggagaacagagcatgacggatctgcgcattggatacggctatgacgtacaccggctggtaccgggccgcgccctggtgctgggcggggtgacggtgccctttgagaaggggctgctggggcactccgacgcggacgtgctgacccacgcggtgatggatgctctgctgggtgcggcggcgctgggggacatcggcaagctgtttccggacagcgatgcgcgctacgccggggcggacagcacggcgctgctgcggcaggtgacggcggtgctggcggaggcgggctggaccattgtgaatgtggacgctacggtggcggcgcaggcgccgaagctggcaccctatatcccggagatgcgggagagactggcggcggccatgggactggacgcgggatgtgtctctgtgaaagcgacgacggaggagggactgggctttaccggcagcggcgagggcatagcggcccacgcggcggcgctggtggagaaaacggcgtaaaaaacccggtgcaatcttcacacattattaacagcggtggggttgtgccaaaagtgaacatatggtacaatatacctgttaagatgcggaggcgtgtctgcccgatacggacagatgcgccgctttttggtataggctatggaggacgaggaaaggaaggtagacttgagccacaggactattcaggacgagcaggcgagactgcgtaaaaaacggcagaaggcggaaaacgtctttgctgtattcaaaaaaccgctgcacgagtcgctgacatcggtattgccggtgatgcttatcgtgctggtgctgtgcttcaccattgcaccggtgcccaacaacgccatggtggcgttcctgctgggcggcgtgatgctgatcgccggcatgggactgttcacgctggggtcggagatgtccatgatcccgctgggacaggcggtaggctccgagatcacacggcgaaagaaggtgtggatcatcacggtggtgggcttcctcatcggcatgatcattaccgtggcggagccggatctgcaggtgctggccaaccaggtaccggccattgagaacaacgtgatcatctggtccgtggcggtgggcgtgggtgtgttcctggtcatcgccctgctgcgtatcgtgctgggtatccagctgcggtggctgctgatcgggttttatgccatcgtattcggtctggcgatgttcgtgtcgccggatttctgggcggtggcttttgactccggaggcgtgaccactggacccatgacggtgccgttcatcatggcactgggcgtgggcgtgtgcgccgtgcgaagcgacaagcaggcagggggcgacagcttcggcctggtggcgctgtgctctatcgggccgatcatcacggtgctgatccttggattgctgtataagccggacggaagcgcctacaccgcggcggtcatgccggatgccaaggacacggtggagatgttcgatctgtatctcagcgagatacctcactatctgaaggagacggcatcggcgctgctgcctatcggcgctttcctgatcctgttccagctggtgacccgcagactcaagcgcaaggagatactgcacatggtcatcggtctggtgtatgtgtacataggattgaccatcttcctgatgggcgtgaacgtgggatttatgcccgtgggcagctttttgggcggcagcatcgccagccatacctataattggatacttatccccattgctatggtcatcggttatttcatcgtacaggcggagccggctgtccatgtgctgaacaagcaggtggaggagatcaccgccggttccatcccggctcacgccatgaacctggcgctgtctgtgggcgtggccatctcgctggggctggctatgatccgggtgctgacgggtatctccatcatgtggttcctggtgccgggctatgtgctgagtctggcgctgagcttcgtggtgccgcagatctttacgtccgtggccttcgactccggcggcgtggcctccggacccatgacggctacgttcctgctgcccttcgccctgggcgcctgcgacgctgtgggcggcaatctggtgacggacgctttcggtgtggtggcgatggtggccatgacgccgctggtgaccatacagctgctgggcctgagctatcagagaaagctgcgccgcgcacctgctcctgccgcgcctgtggcggtggaggagcttatcgagctgtgctgaggaggtggagatatgtctgaaacaaccaagaaccgtctgtatctgatgatcaccatcaccaaccgggtcatgggcgccacgcattttctggatttctaccgggctttcggcgcgccggtggtgttcaccgccctgggacggggcaccgccagcaacgacgtgctgagttatctgggtctggaggctacggagaagtccgtgatgttctccgtggtgacgccggctgtcaaggaggtgctgatgcgggaactggtggacaccatgcggatcgaccggcccggcagcggtatcgccgtgtgcctgcacctgagcagcgtgggcggaaggacggcgctgaactatctgatctccggcaaaagcgacgcgcagccggatatgactgtgaaggaggaagagcagatgaacgagaacgcgtatcagctgatcgtggcgatcaccaataccgggtacaccgacgcggtgatggaggcggcctccgccgccggcgcgcggggcggtacggtcattcacgcccgggctaccgacgcggagaacagcaacaagttcttcggcatggccatctcggaggaacgggagatgatcttcctggtgacctccgccgataagcgggcggccatcatgcagtccatcatggagaaggccggcgcccacactgaggcgcagacggtgacgttctccgtgccgctggacgacgcagcggggctgtacagcgccaacagcaactgaaaaggcaaggcccccggcttgatcggaggcagaaaacgtgcctcccccggcgaaaccgggggaggcttttgtgtgaaaggaaccgcaggagggcggcctgttcagcggttattggggggatgcaagatgacgcttcagggcctggaaggtggcgtcactgatgacgtgctccatgcggcaggcgtcctcggcagcgctggcctcgtccacacccaggcggcggagaaagtccgtgaggaccgtgtggcgctcgtagatcttttcggctacctcgcgcccgacggcggtaagggtgatgtagccgccgttgtctacgtcgatatactgcccggccttcagcaggccaacggcgcggctgacgctgggcttggagtagcccatatagtccacgatgtcgatggaacggacggccttcccctggcggatcaggaccaggatgctctccagatacatctcgccggattcctgtaataccacggcggcacctcctttgacacttagagcactctaactgaagtataacacacgactggcgtaaaagcaagtgaaagttaaatatatttaactgtcgttacaatggcgggtgtttcttgacagagcggttagcatgtgctaacatcataccacatgacatagatagacgattgaggtaacgcgctatgacactgaatgaactgaagatcggcgacagcgccgccatcactgccgtgggcggggagggcgcactgcgctgccgcctgctggatatggggctgacgccccggaccgtggtgacactgcggaaggtggcccctatgggggaccccattgagatacacgtgcggggctatgagctgacgctgcgggtggaggacgcccgacagatcaccgtggaaaagagggatcgcgtatgatctttgcattggcgggcaaccagaactgcggcaagactacgctgttcaatgctttgaccggctccaaccagcacgtggggaatttccccggcgtgacggtggaccagaaatccggagaggtacgggagcacaaggactgcaccgtagtggacctgccgggcatctactccctgcgtacctatacccaggaggagatcgtcacgcgggactacatactgaaccagaagccggacggcatcatcaatatcgtggatgctaccaacatcgagcgcaacctgtacctgacactgcagctgctggagctgcgggtgcctatggtgctggcgctgaacatgatggacgaggtgcgcgccaacggcggcaccatcgacgtgcagaagctgtccgacgacctgggcattcccgtggtgcccattaccgccgccaagggcgagggtgtgtccgagctgatggaccgggcggtggagacggcgaaaaaccgggtgctgcccaaggtctatgacttctgcgcggcgaattcgccggtgcaccggtgcgtccatgcggtggtgcatctgatcgaggaccacgctgagcggctgggtctgccgccccggttctgcgccacgaagctcattgagggcgacagggatatggcggaccggctggtgctggatcagaacgagagggagctgctggagcactgcatcgtgcagatggagacggagaacggattggaccgcaacgcctcgctggcggatatgcggtatacgttcatcgagcaggtcaccgccgacgcggtggtcaagtgccatgagagcaaggagcacaagcgcagcgtggcctgggacagggtactgacggggaaatacacggcgctgccggtattcttcggcgtgatgctgctgatcttctggctgacgttcgatgttattggccaggggctcagcgacctgctggcgctgggtatcgactacgtgaccgccggtgtggacggggcgctgaccgcctacggcatcaacccggtggtgcacagccttattattgacggtatcttcgccggtgtgggcagcgtgctgtcgttcctgcccattatcgtgacgctgtttttcttcctgtccattctggaggacaccggctacatggcccgggtggcctttgtcatggacaagctgctgcggaagatcggtctgtccgggcggagcatcgtaccgctgctgatcggcttcggctgctcggtgccggccatcatggctacccgcacggtgtcctcggaccgggatcggaagatgaccattctgctgacgccctatatgagctgttcggccaagatccccatctatggcttttttaccgccgcgttcttcaccgaccacaaggcgctggtgatgatctccctgtatgtgcttggtatcgtggtgggtattctggcagcgctggtgatgaaggggaccgccttcaggggcaagcctgtgccctttgtcatggagctgcccaactaccgtatgccctccgctaaaagcgtggggctgctgctgtgggagaaggccaaggactttttgcagcgggcctttaccgtgatcttcctggccacggtggtcatctggttcctacagagttttgacacgcggctcaatgtggtcacggacagcgcggacagcctgctggcgctgatcggccagtggctggcggtgctgttcaggccgctgggctttggtgactggcgctgtgccacggcgctgatctccggatttatcgccaaggagtcggtggtcagtacgctgcaggtgctgctgggaaacgcggccatcacgtcgctgttcaccacgcgcagtgccatcagctttctggtgttcacgctgctgtatacaccctgcattgcggcggtggccaccatacggcgtgagctgggctcccgcatcaaaacggtgggcgtggtgctgctgcaatgcgtagtggcgtggctggcggcgtacatcgcttacgctgtgggagggctgctgctatgagctggatggactgggtgctgctggcactggtggcgctgtgcggtgtgctggccctgcgtagtgcgcggcgggcgcggaaaaacggcggatgcgccggctgctccggctgcggcgggagctgcggcggctgtaccgggaaaaaggaataaaaaacaaggcccgcgggccttgtttttttacagcaggagaccgtatttggcgcacaggggcaggagcgtgtcctccggcaggtcgccgtcgtacagggcgcggccctgataggcccggagggcggcctccagcagctgggtgtcgtcgcagacgaagcacaccggcttggtgagcatatactggtagtccgccagggcctgtacatcgtcccaggaggtgatacgcagggccaggaccgtctcaccgctgtccagcgcggcggtgagcgtctcctccgcatcgccggtcaggtcgacgacggtgtgccaggagacatcggcaggcagggggaagggcagcttctccgtggcggcgggcagcttgtccgtatgctgcggggccggcggcgtgatgaccgcgccgcccagcgctcgggccagggcggcgatatgcgcggcggtggtgccgcagcagccgccgaacacggccacgccggcggccagaaattccggcaccagggcggtgaattcctcgccggtgcagcggtagaccgtctcgccattctcgatgatgggcattccggcattgggcttggcgatcaggggcacccgggcatattcccgcaggcgcttcagctggagaagcatctgctccgggccggcggagcagttcaggccaaaggcgtcgatgcccatgccctgcaggaccaccagcgccgcggtgatgtcggtgccggagacgctgcggccgttttcgtcacaggtgaaggtgacgaagataggcttgtcgctgacgctgcggacggccagcaccgccgcacgggcgtcggagagggtcatcatggtctcgatgacgaacaggtccacgccggcgcgttccagaccggcggcctgctcggtgtagatgtccaccagctcctcgaaggacacgtcgcccagtggggcgaggaacgcgccggtgggggacatatcgcctgcccgcagggccttgccctgcaccgcctgggcggacagttccgccagacggcggttgtagtcggcggtgcagttgaacaggccggactcctccagcttgcggcggttggcaccgaaggtgggggtgtagaccacctggctgccggcggccacatagccgcgctggatgtcgatgatggcgtccggatggtccagtgtccactgctcggcgcagacgtcgcctgtatagccgcgcttttgcagctcggtgccggtggcaccgtccagaatcagaggaaaacgaagctccataggtgttacctccattgcatgggttttaggggaatgtttttggcaaaggcgtcggcgaagtcgggacgcccggagagctcgagataggtgagacggctgacgatgccgtccgcggcggacatatcgccccgcagggccagctgtgccgcaccggagagggcggcgttgcctacgctgtggagcttggcggcggggagacgggggagcataccgatggccgcggcgctggcggggtcaaggtacatcccgaagccgccggataggtacagaccgtccagcgcggaaagggtcagcccctgctgcgccagcagcacctgcacgccggcggccaccgccgccttggccagctgcagcgcccggacatcagcggcggtgagatacacccggtcggtcaagtggaagacgccgcagccgttttcgtcacgggtcaaatagcggcggaacgcctcaggcgcgtcctccggcggtaggagacggccgccttcgtcaatgacgcccaggcgcagcaggagggccgtcaggtcgatgagaccagagccgcagagaccgactgcctcgccgccgccgatgacgttcatcttgaaggcgccgctgtaccggacgcggctgaccgcaccgtccacgcccagcataccgcaggcgatacccgcgccctcgaaggcggggccggcggccacggcgcagcaggtgaagccatccatgccgcccagggccatctcgccgttggtgccgatgtccagaaacaggaaatggcccgcgcgtcgggcaaggccggaggccagcaggccggcggtgatatcgccgcccacgaagcccgccgcgcaggggacgcagtacagcggcgtgtccagcagcgtgaggccggagctctgacggaagaaggtctccgggcagaagggggcggcggccagcgggcggacggatacaccggcgagcaggctctgcatgacggtgttgccggcggtcacggtgcgcttcagctcggcgggctgccgcccggcctgggagagtgcccgggtgagcagggccttcagctgctggcggagtagggaggacaggcgggtgagcccgtcctggtggtcgatggtatactggatgcgtgtgatgacatccgcgccgtagggggccagagccgtccagtcggcgcaggtggccagggcgtggccggtggccaggtcgtacagccgcagcgccgtggtggtggtgcccaggtcgatggcggcggcgcagcctgtctcgccggtggggacggcggggggatccagcgtctcggtgaggatgcgcccgccggcggcgggagggaggacgatctcgtcgccgtcctccggcaccacacggcaggccagacgcggcacgccgttgacgctgacgcggcatttgccgcagcggccgtggccgccgcaggcggcgggcagggtacagccggcgcggcgcagcagagccagcagggtatcggtatcattgcaggggaggcgaaaaacatctccgccgcgggtcacgcggatacttgacacgggcaacacccctttttataataattccactactacttttatcagcccggggcggctttgtcaagaggatttgccatgagaacaaaactgatgacgctggcggcggaaaacgggttctcccacgccgcgccggtggacatgaacgcgctgacgccccggcgggaggtgcgggagatgtgccgggcggaccgatgcgggaagtggaacgccaactgggcctgcccgcccggctgcgggacgctggaggatgccgcggcggccatggggcgcttcgatgccggggtgctggtgcagaccaccgggacgctggcggatgacttcgactacgaggggatggaggcgatccagcggcggcacaagcgggcctttgcggactttgcgcggcaggcgcggctgctgctgccggactgcctgcctctgtcagcgggggcatgcaccgtgtgccgccggtgtacctgtccggaccgaccctgccggttcccggacaagcggatgtcctccatggaggcctatggcctgctggtgggggacgtgtgcctgcggtccgggctgtcgtataactacggaccgcgaaccatgacgtatacatcgtgcctactctataccgaagaggtgaaatgatatgatgacgcccaaggagaactttctggagctgctgaagccaaatggccagccggatcgccagctgtgccagtacgaggcgctgcacatgtgcctgaacgatcccatcaacacctatctgcggggcaaccggaagcgggggaccgtcagcaaagaccgctggggcaccaccatcagctttcccgccgacgcgccggggcctatgcccgttaccacggacggcctggcggtgtgcccggacatcacccattggcgggagacggtgcacgcgccggacatcgccgcctgcaccgagggctgggaggcgtgccgcgccgcggcacgggcggcctgcggggaggagaagctgctggcgggctttatgggtaccggtatcttcgagcagtgccacttcctgatgggctttgaggacacgctgacgaacctgtatgagcacccacaggagatgcacgcgctcattgactacatcaccacgtatcggctgctgtacgtgaagctgctcatcgacaatttgcagccggacgtgatcttctctcacgacgactggggcaccaaggacgctttgttcatgaagccggagatgtggcgggaattcttcaaggagccgtaccggcggttttacggctacatccggtcccggggcgtgatcgccatccaccacgcggactcctatttggtcccgatcgtggaggacatggtggagatcggcatccaggtgtggcagggtgtgctgccggagaacgatataccggccctccagcagaagctgcacgggcgtctggtgctgatgggcggtatgggcgccgccatcgaccggacggatgccgcgccggaggagatctacggctatgccatggataccctgcggcggtgctgcccgggtgggcactatatcccctccatcacctatggcctgccgggggcggtgtatccccatgtggacgagtacatcgaccgggccatagcggactacaaccgggcgctgcacgtgccgcggttcgatctgccgtcggtgccacgccgggtgcgggctgtcgccgtgcggcaggcggcgggcgccgctgtcgagaacggcgacgtactggcccgcctggccgcagcgctggaaaagggacagcagaaaaaggtgctggcgctgtgccgggaggcgctggagcagggtcggacgccgcaggagatcctgtccggtgggctgatccgcggcatgaacgatctgggcgaggcattctccgccaaccgggcctttgtgccggagatgctgatggccgcccggtgcatgacggcggcgctgggggagctgaagccgctgatgaccggcgggaatgccaagacggtgggccgcgcctgcgtcggcaccgtccggggcgatatgcacgacatcggcaagaacctggtgaagatcatgctggagggcagcggcgtagaggtcattgacctgggcgtggatgtgacgccggagcagttcgtggagacggcgaagcggcagcgctgcggcgtgatcgcctgctcatccctgctgaccaccaccatgggcgagatgcgccgggtggtgacgctggcccgggaggcaggtatccgggaccaggtgaagatatttgtgggcggcgcgcccatcagccagagcttctgcgatgagatcggcgcggacgtatacaccgaggatgcggcggcagccgcacgggcggcggtatcggcgctgaagggataaatcggcagtcataaaaagcgacagacccgcaggcaatgcctgcgggtctgccgctttgttggtcgtagttggggagaaaataatatggtacggaacagatatgtgctatgtgcggtagggggagatcacatggctatgatggacagcttcctacatacggtccggttgactgcttgctttcaataaacacagttgacttgcgccctctatgtcaaaacgcgcgacgctgcatcagcatccgcaccagcgtgacaacggcgaggacagcgataacagccgccgacgcgatgctcacgaaggagagcagcgcaccgtgggcgggcggcatcaggaatgcggccacagcggaggcgaggcacaggatgaccagagaggtgatgagcttcgttctatccatagtagttgttctcctttcatggtgtgggaatgttcatttccttctgtgcttacagcataccatatatagtggtacgcatctttacagaaaagctacgaaccggtggaaagacggatacaaaatggttacaaagtggtcggaacggtgacaatgggtgtagactttccggccggtttctgctataatgcaggaaagctgtcattttatctctcggaggcgctgctgttgcaatatttgacaaatctttggaacgcgctggactttggctcgctggagagcatactgctccgcgtggcctccgtgttcctgtgcctgaccatacatgagacgtgccacggcctggcggcctatgcgctgggcgaccctacggccaagcgggcgcatcggctgagcctgaacccactgcggcacatcgactggctgggccttattatgatggtggcggctggctttggctgggccaagccggtgccggtggatccgcattatttcaaaaagccaaagcagggcatggcgctgacggcgctggccgggccggtatccaacttcctgctggcgcttttgctgctgctgatcgcccggggcgagttcctgcgggcggtgaccacggggagcttcagcggcacatggttttccttcctggtggatacggcatcgctgtcggtgggcctggggctgttcaacctggtgcctatcccgccgctggacggctcaaaggtgctggcggtgctgctgccggaccgggcgtacaactggctcatgcgctatgagcgcttcggtatgctggtgctgctggtagttatctccgtgggtgtcggcagcaacgcgctgaacagcgccatacgctggacatttaccctgctgtgcaggctggtcggttttgaggtgtaaatttggacgatcctatttttaaactggaaaaggtggtacagacgcggggcgacgagccgctggaggacttcgaggggccgctggatctgatactgtacctgctgggaaaaaataagatagagatacaggatatccccatcgcactgatattggagcagtaccaggattatctggaaaagcgcaagcggatggatctggaggtggccagcgagtttatcaccatggctgcccagctgatgttcatcaagacccgtatgctgctgaacctggaggacgaggaagcccagagtgagatggatgccctcatcaagtcgctggaggagcgcaagcggggcgaggcctatgcccgggtgcgtatgttgtcggaacggctggcacccctgagcgagttcgggcggaacattctgaccaggccgccggagcctatggagcgcgggaagatctatgagtacgaccaggagccggcggatctggtgctgaccatgcaggaggtcacggaccggcagggcgcgccggaggcaccgcctatccgggcctttgacgagatcgtgaagcgggagccgtatcctgtggagacaaaggcgaaggagatcctgcggcggctgcggggtgtgggcattacgcgctttttgctgctgttccgcggcagtaagacacgcagcgagctggtggccacgtttatggcggttctggagctgtgccggaacaatctgatcaagctggccggcgcggccagcgactgcaccgtcaccgcagagggcgacgcgcccgaagaactgatgtaaggggagacctatggatacactggaaatgaaggatatcgaggccgccgtagagggcatactgtttgcctccggcgagcctgtggcggtggaccgcatctgcgtggcgctgaacatggaccgccccacggtggagctggtactgcagcatttgcaggactattacagctatgagcgacggggcgtgcggctgctgcggatggaggacagctggcagctgtgctccgcgccggagtacggcgaccagatccgcaaggcgtttgagatccgtaagcccgccaagctcagccagccggcgctggaggtgctgaccatcatcgcgtactatcagcccaccacccgggcctatgtggaccagatacggggcgtggacagctcgtacacggtgggcctgctgctggatcgccatttgatcgaggagtgcggacggctgcaggtgccggggcggccgcggctgtaccggacgacacaggcatttttgcgggcattccatctgaattcgctggaggagctgccccagctgccgggaatggaggccgacggacagctgcggctggacgacgatacgataccggcggacggggaaaacggcgcggaggcgctgtaagcatacgggagagataacgcgggaggagggagcacgatgacggcagtgtacatcatactgggcattctgctgtttttcttcctgctgtcactgctgcgtatcggcgtgcgggcagactttgcgggcgaccttgcggacacaagcgtcacggtgatcgcggggccggcgcggatacagatgcttcccaaaccggataaaccggagaagcaaaaaaagcccaagaaagaaaagaagaaaaagacaccgcaggaggagagcaccaaggggaaggaaaagaaaaagccgtctctgtcggcgcaggatatcaagacgcttctgccggcggtgtgggcgtccctgaagggcggactgcgaaagacgcggcagcggctgctgatcgacccgctggagctgtcggcggtgctgccgggagccatggacccggcgggggcggcggagctgtacggctatatcaacgccggaatgtggacggtaatgccgcagctggagcagctgacgcggataccggaccccggcctccacgtggaggtggactttgacagcgagcagctgcggctcacaggccggctgggcgtgagtttgcagatacgggatctgttcgccatcggctgggccttcgccaagccggtgatacggtggctcctggccatgcggaagcggcagagcgccgcggagaagacgaaggcggcgcagaacgctgcaaagcagcgcgaaacagtacacacagcgccggacggcgcgggacatacgaccacatcaacttcgacaaaggagagctgacaatggaaatgaccgagaagaaaaatgacctcaagagcatgatggtggagtctatggagaaggtcaaggagatggtggacgccaacaatatcgtgggcgagcctatcaccacgccggacggcgtgacgctgatccctatctctcggctgagctacggctttggctgcgggggcggggactacggcaaaaacaaggaaaattccggcgccggctgcggcgcgggcgtgcgggtggagcccatggccttcctggtggtcaagggcggcgtgacccgtatgctgccggtgggtacgccggccatcaccaccgtggaccgggtcatcgagatggtgccggagctgctggatcgggtcgagggcttcgtggataagaagcggaacaaggatttctgataccagacaagaagacaagcagcgcgggaatagactgagagcatcctgtgacgaggagggctttctgtgacccgagggatcttggcggcgctgtgcgccgcactggccgtgctgacgtgcatacccgctgtggcggaggctgtggaggtctccgccacggcttgcgtcctgatggacgcggacacggggcaggtgctgtatgaaaagaacggggacaagcggatgctcatcgccagcaccaccaagctgatgacggcgctggtggctctggagctggggacgccgtcgcaggtcatcaccgtaactgccgcccacatggcggaggggtcgtccatgtacctgcggccgggggagaagctgacgctggaggagctgctgtacgggctgctgctgtgctcgggcaatgacgcggcactggcgctgacggaatgtgccgggggtacggcgccttttgtggaacggatgaacgaaaaagccgccgcgctgggcatgaggaacagccattttgccaaccccaacggactggacgacgaggcgcactattccaccgcctatgacatggcgctgctggggtgcgcggcggtgaatgagccgacgctgcggcggacggcctccacacagacggcggtcatcggcgggcggacgctgaccaaccacaacaagctgctgagccgcctggacgggtgcgtggggctgaagaccgggtacacgaaggcggcagggcggacgctggtgtcctgcgcggagcaggcgggacatcggctggtggcggtaacgctgcgggacggggacgattggaacgaccacgaggcactataccgctgggggttcctgctgacaggcatacaggagacgctggagacgcgcctgctcggcgcactgggaaacgggagagaggtatcgccatgaccgagcgcatacagaagctgctggccgccgcggggctgtgctcccgccggacggcggaagagtggatcgccgccggacgcgtgaccgtcaacggacggcggagccgtgtaggcgacaaggcggatccggagacggacgatatccgggtggatggacggcccctgcggggcgcggcacagcacgtgtatctgatgctgcacaagccgcggggctatgtgaccaccctctctgacgaacggggccgccctacggcggcatcgctggtcaggggctgcggcgcacgggtgtatcccgtgggacggctggacctggactcggagggattactgctgtttaccaacgatggggcgctgacccatgcgctgctgcatcccagccatcaggtggacaagacgtatatcgtcacggtcactggcgcggcggcggacagcgcacggcagctgtcggcggtggacagactggacggacagcccatcgtgccggcggcggtgacggagctgtatcggaaggatggtacggcgaaataccgggtggtgatccaccagggtaagaagcggcagatccggcggatgtgtgccgccgcaggactgactgtgacccgactgtgccgggtggcggagggcagtatcgccctgggtgacctgccgccgggaaagtggcggtatctgacagcggaggagctgcaatctatcaaaggaagccatcaacatgaatgaaaacgtgctacagaccatccgggccgggatggataccttttcgaagggacagaagcgcatcgcagcgtttatactggacaattatgaccgcgcggcatttatgaccgccgcgcggctgggcgagacggcctccgtcagtgagtccacggtggtgcgctttgccgcgcagctgggctacgacggctatccggagatgcagaaggccctgcaggagctgatacggggtaagctgacctccatccagcggatacaggtatcgcgggatcagatgtccggcgcggacattctgggcagtgtgatgcagcgggatatgaacagcatacacaatgtcatcgagcagttggaccgggatgccttcagccgggcggtggacaagctgctgggggcggagcacatctatatcctgggtgtgcggtcctcctcatttctggcggggtatctgaacttctacctgcacctgatcttcaagaacgtgacgctggtgcagtccagcgccgccggtgagatctatgagcagctggcccacatcggcaggggcgacgtgctggtgggaatatccttcccgcggtactccaagatggctatccacgcggtggagtttgcctgccggcggggcgcggaggtggtggcgatcaccgattcggcactgtctccgctgtacggcatggcggcggtatcgctgctggcgccctgcgacatgatctccttcgtggactccatggctgcgccgctgagcctgctgaacgcgctgatcctggcggtggggcagcagcggcgggatgacctgtccgccacgctggcggatatggagcaggtgtggtccagatacagtattttcgggaaagatgacgagtgacatggcgaaggagatcgtggtgatcggcggcggcgccgccggtctgatggcggccatcaccgcggcccggcagggcgcggcggtgacgctgctggagtccaacgaacggctgggcaagaaagtgaatatcaccggcaagggccggtgcaatgtgaccaatgactgtgaccgggagacgctgcttgccagcattcccggtaatgggcgatttttgtacggtgcgctgacacggttcacgccgcgggacaccatggcgtttttcgaggcgctgggcgtgccgctgaaggtggaacggggaaaccgggtgtttccggtgtctgacagtgccttcgacatcaccaacgcgctggaacgggagctgaagcgccggaaggtgcggtgggtccgtgaccgggccgtatcagtggagacggcggatggcgcggtatgcgccgtgaccggagagaaggggacgtaccccgtgcaggcggtcatcctggccacaggaggggtgtcctatcccggcaccgggtccacgggggacggctaccgcatagcggaggcactgggacacaccattgtgccgctgcggggatctctggtaccgctggtgtgcgcgggcgaggactgtccggctatgcagggcctgagcctgcggaacgtggcagtgacggtatacaacgggaagaaaaagacggtgttccgggatttcggcgagctgctgtttacccacttcggggtgtccggaccgctggtgctgtccgccagcgcccatctgcggcgctgggagggggagcgctatacgatagagatcgacctgaagccggcgctggacgagcagaagctggacgcgcgggtgctgcgggacatcggagaaaatcccaaccgggagatggggaccatcgccgcggggctggtgccccacagcatggcaccggtggtgctgcgccgggcggggctgaccggaagcgaaaaggccaacagcctgacaaaggaacagcgccgggcactggtgcaggtgctgaagcactttacgctggagcttaccgggccgcggcccgtcagtgaggcgatcgtcaccgccggcggcgtgaaggtgggagaggtaacgccaaacaccatggcgtcgaagcgggtgaggggattgtattttgccggcgaggtgctggatgtggacgcctatacggggggctttaatttacagatcgcatgggcgacggggtatctggcggggctgagcgccgcagaaagcgaggaaatgacatgacggagagacagtacgcagtggccatcgatgggccgtccggcgcggggaagagcacgctggcccgggcggcggcggaggcgctgcatatcttatatgtggacaccggggccatctatcggaccatcggcgtgtatatgtatcggcacgacatcgcgccaacggacgcgccggcggtgatcgcggcgctgccggagatcacggtggccctgcggtatgacgaggagggtctgcagcggatgtatctcaacggcgaggacgtgacgaaggagatacgcctgccgatgatatcgaagtacgcctcagacgtgtcggccataccggaggtgcgggcgttcctgatggagctgcagcggtctctggcgcgggagcacagcgtcatcatggacggacgtgacatcgggaccgtggtgctgccggacgcggaggtgaaggtgtttctgtgcgcggatgtggagacgcgggcgcggcggcggtttttggagctggagcagcggggcacgccgaagccctttgacgaggtgctgcgggatatggagcagcgggattataacgacacccaccgggcggcggcgccgctgcggccggcggatgatgccattatgatcgacaacacggacatggacttcgcggccagcctggagctgctgctggatgtgatacgggggcgtgtggcatcgtgagaaataagttttacgcggcggcgtggcgggtgctgcgcccgctggtgctgtttttcctgccggtggacctgcgagggacggagcatctggagggcggagaaccggtgctgctgtgcgccaatcactccagcgcctgggaccccatcctattcgtgctgtccatgccccagcggttcaacgtgcggatcatggctaagaagcagttgttctccatccccatcgtgggtggattcctgcgggcgatcggtgtgtttccggtggatcggggcaacagtgacattggggcggtgaagaccgccatacagagcctgcgggacgggtggaacctgttcctgtttccggagggaacacgggtgaagacaccgggacaggcggaggtcaagtccggcgcgggcatgatggccatccgtgccggcgtgaagctggcgccggtatatatcggcacgaagaagcgcatattccgcaagacgcccatcataatcggcgagcccttcgagccggagtacaccggccgcaagggtacggcggaggaatatactgccaacgcccatgaggtcatgcggcgggcctatgccctgggagggatcgaatgcaggtgatactggcgaagacggcggggttctgctacggcgtggaacgggccgtgcacatggcggaggcggctgcccgggaaggcggctgcgttatgctgggcagtatcatacacaatgaccgggtcatcacagcgctggaggcgttgggtgcgcggcaggcggacagccctcagcaggtgcggccgggagagacggtgatcatccgtgcccacggcgagacacgggaggctttgcggctgctggaggagcggggcgcacagatcatggatgccacctgtccccatgtgctgcggatccaccggctggtggaacgggcagcccgtgcgggccggacacccatcattatcggagaagcgcaccatccggaggtgatggccgccgcaagccgctgtgagcgcagcgtggtgctggaaaacacggcagagctggctgattgggtggcggcggacccggcgcggaaggacatggatttgctggttaccgcacagacgacctgtattcgttcgatatgggaagagtgtgtaaaatttttaaaaaaacagtgtacaaacgccgaaatctttgatacaatatgtgatgctacgcaaaaacgtcaatccgaggcggcgaatatcgccggacgggcggacgttatggtcgtggtcggagatcgtaaaagtgccaacaccagacatttagcggagatctgcagcacacgctgcgcccgggtctatcagatcgaagggccggaggagctgcgggtcgggtcccttaacggatgttctgtggcggggcttacagccggcgcgtccacgcctgcgggcatcattaaggaggtatatgcaacgatgagcgaagagatcaagaacatggaagctacggaagagagcttcgaggaaatgctggaaaaatcttttaagactttgaatacaggagagaaggtaaccggtattgtaacggcgatcggccccaccgaggtgcaggtcgatctgggctgcaagcaggcgggctatatctctgtggacgagctgtccgcagatcccaatgtgaagcctgaggacgtcgtcaaggtcggcgacgagatcgagacctatatcatccgcgtcaacgacgtggagggttatgccatgctgtccaagaagcgtctggacgctgtcaaggtctgggaggatatcgagaaggcccgcgaggacaagaccactctcgaaggtaaagtcaccgaggagaacaagggcggtatcgtcgttaatgtcaagggcgtgcgcgtgttcgtgcccgcttcccagtccggtctgccccgcggcgctgagctgagcaccatgatcggccagaccgtgtccctgcggatcactgaggtcaaccgtgcccgccgccgcgtcgtcggctccatcaaggccgtgacctatgaggcccgtcaggccgcccaggcggagatctggaacaacatcgaggtcggcaagcgctacaccggcaccgtgaagtccatgacttcctacggtgtgttcgtggacatcggcggcgtggatggtatggtacatatctccgagctgtcctggagccgtatcaagaaccccgccgaggtcgtctccgtgggcgataccctggacgtgtacgttatctccttcgatcccgagaagcacaagatctctctgggcgtgaaggatcgcagcatgaatccctgggataagttcatggctacctaccatgtgggcgatgtggccaacgtgcgtatcgtgaagctgatgaccttcggcgcgttcgccgaggtcgtgcccggtgtggacggcctgatccacatctcccagatcgcggatcgccgcatcgagaagcccggcgacgtgctgaccgagggcgagatggtggatgccaagatcaccgccatcgacgaggagaagcagaagatctccctgtccatccgcgcgctgctggctcccgccgctgacgaggacgccgacgaggagtaattagatcgtaaaacacctccgctgccccacaggcagcggaggtgtttttggttgttttcacaatggcgtgcaggggaaaatatcttgcgaccttgcggagaggcatggtacaatcgaggtgggcaagagaatttaagagcattgtgctgaagatagaacggatcaattggaatttgacagggggagcgtgatcgtatgaaaaagttgatggcatcagtgttagcgttggtttgcgttgttgctatggcgggctgcggaaagtcgaatgttggggactatcctgcgacgataatggtaaatgggataaattactattcgaccgataatgctgttcccgttgaagtagacgagagtgttattcagtacaccacgtcgtatgcggaggatggcgttccccgaaaagatggtgaggcaaacttcaacagagacctggggactccgtatgctgttattgaggaagacttggtagttgtccttatggacaatgagtggatagagttcaaggcaaagtaagagcgatctcgggtcgcgaaagagcgggacgatgggagaagcgtgccgtacgaaagggacgggggatgaagcgggggaaaagaaaaataattttgggagagttgcctgtttgtgggcaactttcccggtttttggcataggggcagaaccggatcgcaggaaggggggagcgcatatgaaaagagcagacgtgaactggggagaggtaaggcgtaagtatgagtcgggaatgtatacctatcagcgattggcaagggagtaccatgtgtgcacacagacggtgtggagacatgcgatcaagggacagtggcagatcggccgggaggaggcggaaaagcagatactccggcgatgcctgatggctacggcaaagctgctggagacggcggctgccggagcaacggaacggctggaaagcggagagggcagcctgaaggaggtcaaggagctgggaggtatcttgcaggcgctggtggggacagcggcaaagatgtgtcagagcgaaaagaacaaggacacggcggtcaacgagatacgggtgatcatgtcggaggaggtagaggcgttgagcggatgatatccatgccggacctgttcatttttgcacaagcattcccgggaattcttgtgggtttcgtcaatttccccgcgggctgcattgtggtaaaattaacaattagaaaattcagccttcgtcggaagggataggaaagaacagggaggaacaggacatggcttttgctgattttcaggcgctgtacaagcagaaactgaccaccgcggacgaggcggtgaaggtcatcaagtccggtgattgggtggactacggcttctgcgccattcatccccgggtgctggacgaggcgctggcccgccgtgcaccggagctggaggatgtgaaggtccggggcggtatcagcctgtggaagccggcgatcttcgacatcgaggatccggtgcaccatatcatcttcaactcccaccacatgagcagcgtggagcgccatcatatcgccagcggcgccgggttccacgagcccatgcggtactccgagctgccccggtactactacgaccacatcacgccgccggacgtggccatgttccaggtggccccgatggataagcatgggtacttcaacttcggactgtcggcttcgcatgtgaaggcggtgtgcgagatggccaaggtggtcatcgtggaggtcaacgaaaatatgccccggtgcctgggcggctttgacaactgtatccacgtcagcgaggtggacatgatcgtggaggggcgcaacgaccccatgggcatccagcccagcggcacggctacggaggtggaccgggcggtggcgaagctgatcgtggagcagatacccgacggggcctgtttgcagctgggtatcggcggtatgcccaacaccgtgggcgccatgctgtgcgagtccgacctgaaggatctgggcgtacacacggagatgtatgtggacgcctatgtggatctggcgatggcggggaaggtcacatgcatgaagaagaacatcgaccggggccggcaggtgttcgcctttgccgccggtacccagaagctgtacgactatctggacgacaacccggcgtgcatggccgcgcccatcagctacaccaacgacatccgtaccatcgcggccatcgataactttatctccatcaacaacgcggtggatgtggacctgtacgggcaggtgaacggtgagacggcgggcaccaagcagatcagcggcgccggcggtcagcaggactttgtgctgggcgcgtatctgtccaagggcggtaagagctttatctgtctcagctccactcacgcagacaaggacggcacgctgcattcccgcatacggcctaccctgcagaacggttccgtggtgacggatacccgcgtgaacaccatgtatgtggtgacggagtacggctgcgtgtgcctgaagggactgacggtgtgggagcgcgcggagaagctgatctccatcgcgcacccggacttccgggaggaactgatccgcgaggcggagaagcagaagatctggtatccccacaacagaagataacgaaaaagagcgccggaaggcgctctttttgcatgaaagaggcggtatccgcgcaagctacggcaaaaaggaggcgcggatatgagcaacgacgaaaaccgggaaaagaacgaggaaaaagcggcggtgccggtacagccgatcattgatatgggcagcactgtggtgaaaaacagccgggggacggtgcactgcctgaccatcgtggggcaggtggagggacacacgctgctgccggacaatctgaagagtacaaagtatgagcacgtactgccgctgctggcggcgctggagcagaacgaacaggtggacggggtgctgctgcttctgaacaccgtgggcggcgacatcgaggcgggactggccatcgcggagctggcagcgggcatgacgaagccggtggtgacgctggtgctgggcggcgggcactccatcggcgtaccgctggcggtgtgcggaaaggagacgttcatcgcgcccacggcgtccatgacggtgcacccggtgcggatgtccgggacggtcattgccgcgccggagacgtacaggtattttgaacgcctccaggagcgcatcattcagttcgtggcggctaacagccgcgtgaccgcggaacggttccgggagctgatgctctccagcggcgacatggccaatgacgtggggacggtgctgtacggcgagcaggcggtggcagagggtatcatcgaccggatcggtacactgggcgacgcgctggaggcactgtacggacagatcgaacggcggcatggatagacattggcggagggcgggggctctccgcttttttcatgccggcgcgcggtttttcttgaaaaacggggacttccatagtatactatcttagttaaggtatgccaaagtataagaggtgacgcagttgtacttaaaagcacttgagatacaggggttcaagagcttccccgacaagacggtattgaatttcggcgaggacatcaccgccatcgtgggaccaaacgggtccggcaagtccaacatctccgacgccatacgctgggtcatgggcgagcagaacagccgccagctccgcggcgccaagatggaggacgtgatcttcggcggtacggagaagcggaaccagatgggttttgcccaggtgacgctggtcatcgacaacaccgagcatatcttccctacccgggaggaggcagaggtggccgtgacacggcggtattaccgcagcggtgagtcggagtactatatcaataagcagtccgtgcggctgaaggacgtgaacgagctgttcatggacaccggtatgggccgggagggctattccattatcggacagggcaagatcgacgagatactgtccgtgaaaagcggcgagcgccgggagatcttcgaggaggccgccggtatcagcaaataccggcaccgcaaggaggagtccgagcgtaagctggagcgcaccgaggaaaacctggtgcgtatcaacgacaagatcgccgagctggaattgcaggtggagccgctgcgggcgcaggcggagacggcgaagaagtatctggtgctgcgggatgagctgcgggtgctggagatctccgtgtggctggagcagctgcaaaacctgcggactgccaagctgaagctggagagcgatacggctcaggccaaggaggcctgtgaccaggcccaggcggcgctggacgaggcctacgcccagggagagcgttttaccgaggagatgcggcagaacgacgtggcggctgatgcgctgcgcggtcaggtgaccgaggcggagtccgccgccggcgaggagtctgcggccatcgcggtgctgcagacctctgtggagcacaacaacgagtctctgcgccggctggaacaggaactgaccagcacagaccagcggcgagagaatttacagggacagatcgacggacagctggcgcgtatcgcggacatcgaccgcgacgcggcggtattggagacggcgctgagtgagctgctctctcgggcgcaggcgctggctgacagcgcaaagggcgcggcggacgaggccgaggccctgcgggcgcaggaggccattgctgtggccgaggccgcagacgggcgcgccgcgctgtccgccctgcaggcgggcctggacgaggccggacagcggcggattacggtacggcaggagctgtccgaggcacagcgtaagctggaggagagcgaaaaggacgcaaagaccaatcgccgggcgctgaacgatgccagggaggaggcccaggcggcggagaatatcattcagggtcacagcctgcgaatggacagccgccgccagaaggcgcagagcacccaggacgcaaaacaggagctgacccggcaggtgaacgcccaggaggaccgcatccgtctgctgacggagatggagaaggagtatgagggcttcaacaaagcggtaaagaccgtgatgcaggcagcggagaagaacacactgcggggcattcacgggccggtggccggactgatgaccacagagcaggcctatgccgtggcgctggagacggcgctgggcgcggcactgcagaacattgtggtggaacgggaggaggacgccaaggcggccatccagttcctgaagcagcgggacggcggccgcgctaccttcctgccgctgacggccatccggggcgacgagctgcgggagaacgctgcgggagagtatggttttgtaggcatcgccagccgtctggtgcggtacgacgcgcgatacgaccatatttttaaaaatctgctgggccggacggtggtagtggaggacctggacagcggtatcgccatggcgcgtaagttccgcaatgccttccgcatcgtgacgctggacggacagatcatcaaccggggcggctccatgaccggcggctccgccagccgatcctccggcgtgctgtcccgggccaatgagttggaacggctgaaggcggcacagggtgccctgcacggtaagctgaacgaggccgcgcagcaggccgaggcggcccagagggagctacagaaggctgagtatgaattgcaggtggccaaggaccagcagcgcaaggcggcggacgaggtgctgaccctacagggccggcaggaccactatgacctcctgctggagagcctgcgcctgagctgcgagactatggagcaggagttgtccggcctggaccgccgggagacggacggccgcgggcgcatggccgggatacaggcggacatcactgcggcagaggaccgcgcggccgcgctgcggcaggagatgcgggacaagctggccggccagaccgatctgacggagcagaccaaccggctggcacaggccgtcagcgacaagaaggccgatcaggcggcactgagcgcggagaaggacagcgttctgcggagcgtggaggacctgcggggcttgcaggcggatatggtatccgaccgcgctgagcgcgaccggcgggtgcaggaataccggcaggccaacgagaaggcgctggccgatatggcgggccatcaggcggcgctggaggagaagaacgcccgtgtgatacagctgcggcagcggctggaggatctggcccaggccaaactggcgctggagcagcagcgtgaccagcatagccgtgacagccgcgcctgcaacgatacgcttttgcagaccatgcaggcgtacaacaaactacagcagaagctggaaaacagcggcatggaggagagccagatcctggagaagctgtgggagcgctacgaactgagccacagcgacgccatggagcagcgcatcgagctggagagcgtacccaaggccacgcggcgcattgccgaactgaaccgggagatcaaggcgctgggtacgcccaacatcggcgccatcgaggagttcgaccgggtgaacacccgatatacctacctgtccgaacagcgcagcgatgtggagcaggccaaggaggagctgctgggcattatcgaccagatcacccagcagatgaccagcatttttgccgagcagttccagctgctgaacgagagcttccaggagacgtttttggagctgttcggcggcggcaaggcgcggctggagctggaggacgagagcgatatcctcaactgcggcatcgagatcaaggtacagccccctggcaagcagctgaagaccatcacgctgctgtccggcggtgagaaggcatttgtggccatcgcgctgtacttcgccattctgaaagtacatcccacgccgttctgcgtgatggacgagatcgaggcggcgctggacgaggccaatgtggtgcgctacgcccggtatatgcggcggatcgccggaaagacgcagtttatcgtcattacccaccggcggggcaccatggaggaggcggacgtgctgtatggcgtgaccatgcaggaaaagggcgtcagccggatactgaccatcaatctcaacgatatggccaaggagctgcatatcaaataaggagggcttgttatggcaatgggcttatttcaaatactgaaggaggcgttcaccgccgtccccaccttcgacgacctgaacgacgagttctacgacggactggaggaagcgctgatcctggccgatgtgggtgctgacaccgccgctgataccgtggcccagctgcggaagcgggtgaaggaacgctttatcggccggatggacgaggtaaaggacgccctgcgggacattctgaagagcaagctggaggtgggtgacagcgcgttggtgctggagggcaagcccgccgtggtgctggtcatcggcgtcaacggcgtgggcaagaccacatccatcggcaagctggccaagcagctgaaggaccagggcaaaaaggtcctgctgtgcgccggcgatacgttccgtgcggcggccgccgaccagctggagatctgggcgggccgcgccggtgtggatatcgtgcggcagcatgagggcgcggatcccggcgcggtactgtttgatgctttgcaggcggccaaggcacggagcgtggacgtggtgctgtgcgacaccgccggacggctgcacaacaaacagaacctgatgaacgagctggccaagctgcggaagatcatcgaccgggagtgccccaattccagctgcgagacgctgctggtgctggacgccaccaccgggcagaacggactgatccaggcacggaccttcaaggagacggcagggttgacgggtattatcctgacgaagctggatggtaccgccaagggcggcatcgtcatcgccatcgcccaggagctgggtgtgccggtaaagttcgtgggtgtgggcgagggcatcgacgacctgaagccctttgacccgaccgccttcgtgcaggacatgatataaggagggcacaccatgacgagagcagacggacgggcatttgaccagctgcgcccggtggagatgacacccggctttacgaaattcgccgagggcagcgtgctgatccgctgcggcgagacggtggtgctgtgcaacgcctcggtggaggagaagacgccgccccatgtggcggagggctgcggctgggtgacggcggagtattccatgctgccccgggccaaccgggagcgcagccgccgggatgtggacaagctgaagctgtccggccgcagtgcggagatacagcggctcatcggccgcagcctgcgtgcggcggtggatatggcagccctggggccccggaccatcaccgtggactgcgacgtattgcagggcgacggcgggacgcggacggcatccgtgaccggcgggttcgcggcgctggcgctggcctgcaaaaagctggtgaccgacggcgtgatcgagagactgccgctgctgcactatgtcaccggtgtgtcggcgggcattgtggatgacacacccctgctggatctgcagtacagcgaggacagccgggcgcaggtggacctgaactgcatgatgacggagcagggacagctgatcgagatacagggcacaggtgagggccggccctttaccgtggccgagcagcaggcactggtggcgctgtgcgccaaggggtgcggcgagctgctggcgaagcagaaggagatactgggagagatactatgagatttgtactggcatcccacaacaagggaaagctggccgagatgcaggccattctgggcgagctgggcgtggaggtggtcatgccctccgacgtgggcgtggacgtcgacgtggaggagacggggaccaccttcgcggagaacgcagcgctgaaggccaacgccatcatggcggccagcggcctgccggctatcgcggatgactcgggactgtgcgtggactggcttcagggcgcgccgggggtgtattccgcccggtacggcgggctggacagcgacccggagcgctgccggctgctgctgagcaatatgcgcggcgccacgaaccgggcggcgcatttccacacggccatcgtctgcgccttccccaacggggacacgctgacggcggagggggactgcgccgggaccattgcctttgcgcctatgggcgacggcgggttcgggtacgatcctgtgttcttcgtgccgtccctgcgaaagaccttcgcccagctgacggcggaggagaagaacgccatttcccaccggggcagtgccctgcgggcctttgccgcggaactgaaaacgtatttggagaagcaatgatatggaactgacaagcaagcaacgcgcacagctgcggtccctggccaccaatctggacaccatcgtccatgtgggcaaggacggcatcggcgacaatctgatcaagcaggtcaacgacgcgctggaggcccgggagctcatcaagggccgggtgctggagaactcgctgctgaccgcccgtgaggcggcggaggaactggcggtggctgcccgctgcgaggtggtgcaggtcatcggcagcaagttcgtgctctaccggatgcagcacgacaagagcaagcggaagatcgaattggtcaaggcgaagagaagcgtatgaacatcggtatttacggcggcacctttgatccgccccatatcggccatgtgacggcggccaaggccgccatggaggtcctggggctggacaagctggtgctggtcccggacgcgcagccgccccacaaggtgctgccggagggcggcgccgcgccgcggcagcggtacgacatggcggtgctggccacagcggcgctggggaagcgggcggaggtcagtgacatggagctgcgccgcagcggcgtcagctataccgcggacacgctggcggcgctgcgggagcagtatccggatgacacgctgtatttgctgatggggtcggatatgtttctgagcctgcacaactggcgcaggccggaggcgatcatggccatggcccacatcgcgcccttcagccgggaggcggaggatgagtccgccgcctttgccgcgcagagcgtgcgcctggaacgggagttcggcgcgcaggtgaccgtggtgcccaatccgcaggtggtggagctttcctccaccgaggtccgcaccgcgctggcacagggcgggggagaggacctgctgccgccgccggtgtggggctatatccagcgggagcgtctgtacggtacccatacggacctgacgcacctgaccccggagaagctgctgcccatcgcgctgagttatcttaagcccaagcgtatgccccatgtgctgggcacggaacaggaggcggtgcgcctggcggagcgttacggcgcggacgtgacaaaggcgcgcatcgccgcgctgctgcacgactgcaccaagaagctggatatggacgagcagctggcgctgtgcagacactatggcatcccgctggatgagctggagcagaaggcgctgaagctgctgcacagtaagaccggcgcggccatcgcacgggatgtgtttgccgtggacgacgatgtgtataacgcgatcatgtaccacaccaccggtaagccggatatgacgctgctggagaagatcatctatctggcggattatatcgagcccacccgggactttccaggggtggaggcgctgcgaaggacggtatacgaggatctggaccggggcctgctcatgggtctgaccatgaccattgatgagatggaggagatgggtaaccccgtccaccacatgacccgcgacgcgcgggactatctgatgaaaagagggatatcatgaaaacaccgaaagaactggcgctgctggccgcccgtgccctgtccgataagaagggcaaggagatccgcgtgatggagatcgccgagctaaccacgctggcggactatttcgttctggccaccggtgccagcaatacccagatcaacgcactggtggacaatgtggaaaaggtactggcagaggaggccggtgagcagcccctgcaccgggagggctatcgcggcggcacgtgggtcctgctggactacggctgcatcgccatccatgtgttcaatcaagaggctcgggccttctacggtctggaacgtctgtggcaggacggcaagagcgtggacatcagcggcattgtggaggagcacgactgagtttccgcgctgagtggcgcgtacaggtgtttttcccggaaaacggggttgacattcggcaaaaatgcgctaaaatagacttcgatattgtcagaagcgatgaagggaaaaagacggagatcatccacccgaagagagccggcgtatggtgcgagccggcggggacgctctgttgtactggtcccggagctttccgcctgaacagggcgggacgggtacgcgccgttacagcgtcgtctctcgtaagaaagacacggagcgccgcggagcgatctgcgacggaagcagggtggtaacacgtctataacgtccctggctgcgtaaagcagccggggatttttatttgcggaaaacaaaattcacatacaaggagaagcgagcatgaattacgattttgcggccattgagaagaaatggcaagctaactgggagaagacaaagccctatgccgccattaccggcgacaaacgacccaagttctacgggctcatcgagtttccttatccctccggccagggcctgcacgtggggcatccccgcccctttacggctatggatatcgtcacccgcaaaaagcggatgcagggctataatgtattgttccccatcggcttcgatgctttcggtctgcccacggagaactatgccatcaagaaccacatccatcctgccatcgtcacgaagaacaacatcgagaatttcaccaagcagctgaagatgctgggatacggctttgactgggaccgctgcgtggacaccaccgaccccaagtactacaggtggacccagtggatattcctgcagatgttcaagcacggcttggcctacaagtccaccatgcccgtcaactggtgcacaagctgcaagtgcgtgctggctaacgaggaagtggtcaacggcgtgtgcgagcgctgcggcagcgaggtcatccgcaaggagaagagccagtggatgctgaagatcaccgagtatgcccagcggctgatcgacgatctggatgatgtggactatattgagcgcgtgaagatccagcaacgcaactggatcggccgttccaccggcgcagagatcaccttcgacaccaatgtgggcgaccaggtgacggtctataccactcgtgccgacaccctgttcggcaccacgtatatggtcatctctcccgagcacccgctgctgaagaagtggcagcccctcattaagaactgggatgctgtggcggcctatcaggaggaagcggcccataagtccgactttgagcgcggcgagctgaacaaggaaaaaaccggcgtgcggctggagggtatcgaggtcatgaacccggtgacccacaagcccctgcccatgttcgtctccgactatgtcctcatgggctacggcaccggcatcgtcatgggcgtgcccggccacgaccagcgcgactgggagttcgccaagaagttcggcctccccatcatcgaggtggtggccggcggcgacgtgaccaaggaggcctttgtcgccaaggacgacagcgctgtcatggtcaactccggcttcctgaacggcctgaccgtcaaggaggccatccccgccatgaagaaatacgtggtggagcagggcttcggcaaggagaaggtcaactacaagctgcgcgactgggtgttctcccgccagcgctactggggcgagcctatccccctggtgaactgcgagaagtgcggctgggtggccctgccggaggagcagctgcccctggtgctgccccaggtggagagctatgagcccaccgacgacggcgagagccccctcagcaagatgaccgactgggtcaacaccacctgcccctgctgcggcggcccggccaagcgcgagacggacaccatgccccagtgggccggctccagctggtacttcctgcggtatatggatccccacaacgacaaggcactggccagcaaggaggcgttggactactggtcccccgtggactggtacaacggcggcatggagcacaccacgctgcacctgctgtactcccgcttctggcataagttcctgtacgacatcggcgtggtgcccaccaaggagccctacgccaagcgcaccagccacggcatgatcctgggcgagggtggcgagaagatgtccaagtcccgcggcaacgtggtcaaccccaacgacatcgtagcccagtacggcgcggacaccatgcgcctgcacatcatgttcatcggcgacttcgagaaggccgtcagctggagcaacgaggctgtcaagggcagcaagcgcttcctggaccgctgcttcaatctgcaggatatcgccaccgctgaggagtccatctccgccaagaacgagtccatcgtccacaagactatcaagaaggtcagccaggatatcgacgagctgaagatgaacaccgctatcgccgccatgatgaccatggtcaacgagttctacgccaatggctgctccaagggcgacgtggagatgctctgcctgctgctcagcccctttgccccccacatggtggaggagatgtgggagaacatgggctttgccgccaagtacggcaagatggccatgcagatggattggcccgagcacgacgaggccaagactgtggacagccacgtggagatggccgtgcaggtcaacggcaagctgaagggtaccgtcaccgtccccgtggacagcgacgaggctgctgtggtggccgccgctatggagagcgacaaggtgaaaaaggccacggagggcatgagtgttgtcaagaccattttggtcaggaacaagctggtgaacctgatcgtgaagcccgcgaaataaagcgttgtatcccccggtgcagccgggggatactttttctggagggcggaccgccgggacgcacacttttttgccgtttttgtaaaaaaacgacttgacaagctgtgttatccccggtataatacacccgttagtcatgtaaatggctcttaaagagcacccaggatcgagccgggtgtatcggagggagggaaacataaatgtccgaagtccatgttaaggaaggcgagtccctggacagcgctctgaagcgttttaagagaagctgcgccaaggcgggcgtcctggccgaggtgcgccgcagagagtgctacgaaagccccagcgttaagcgccgcaagaagtccgaggctgcgcgcaagaaccgcaacaagcgttactattaagtgacaaagaagcctgagaacataggttctcaggcttctcttttatctatcctgtcaggtcccgcagtatgtcggcgcactccggcagggtcagcagaccccggtgtatgcccaggcgctctcccagagcgatttttctatgcagggtgtcaccgtcgtccagcaggacgaaccgtgtctcgccgccccggcggtacgtgaaataccgggcgcccagctcccgggaaaagaatatctggcggcctgtttgcagggcggctagctgttcatctgtcagcggtatgccctcaccagtgggacaggggagagggaagtccatccgcaggcgctggaggtccagcacgatacggtccggcccgaaggcacggcagcaggcggacaaccggttttcgatatccccgccggacagggcggtgcataccagtacccgcgcgccgggagccgtgtgggcgcatttctcgtggacccacagggcgatgccggaccggtgcaggggctgggccagcgcctccgtcagttctgcggcggggaaggggacgatcactgtgccgtatctccggcggcggcactcctgcaccacgccggctgccgtttccgggctgaagggtcccgccgcgccggtgagcagcatggcaccgccccgcagggcaggcggcatgggcagggcacacagcactccgttttctatccggtaggccgcgttggcgatgggcagctgtgtgccgcaggccatctggcgaagcggcggtgcggcggcgatcatcagctgcataggcgtacccccttgcgagaccacgatgtccgtggtacaatactgctgtactttatgagaggagtcggatacctatgcccatttccatgacgccctaccgggtgtttgacagctaccgcagcatcacgcccgcgttttttatgcggcacggcatccggctgctgctgtgcgatctggactataccctggcgcccaagtcccagccggagccggacgcggacctgcgccgctggctctccgatgtgcgggcggagggtgtggaggtcatgatcctgtccaacaaccgcagccccgtgcgagtggagcgattctgccgcgatctgggaatcacctacgagggccatgcgggcaagccgtccgtaaagggctttcgccgggccatggtgcgctgcggcgtcaccccgcgggagacagccatgctgggcgacaaactgctgacggatatgctgggtgccaaccgggctggcgtgctgccgctgatggtggagccgctgggcgggccgcgcggcgcgtggaataaggtgctgcatggcctgcagaggccgtggaaggccgccagtttgaaaaaacatccggaacggtgacttttttgcgcggaaacacttgccaaacagcaggttatcatgtaaaatatataaggccgattttggctgatattatttattcagagggaatggagatattccctcatacacaatgggaggaatatcaatatggcaactattaccgccggtgatttcagaaacggcaagaccttcgagatggacggcaaggtcatgcaggtcgtggagttccagcacgtcaagcccggcaagggcgcggctttcgtccgcaccaagatgcgtaacgtggtgaccggtgctgtgaccgagacgtccttcaaccccaccgccaagtttgaagaggcctttgtggaccgccgcgatatggcctacagctacaacgacggtgatttgtactacttcatggatcaggagacctttgacatggtacccctgaacaaggagctgctgggcgatgcgttccgcttcatcactgagaacaccgtgtgcaaggtgctgagctataagggcagcgtctttggcctggagtgccccaacttcatggatctggaggtcaccgagactgagcccggtctggccggcaataccgccaccaacaccctgaagcccgccaccgtggagaccggtgccgaggtgaaggtgcccctgttcatcaacatcggcgacaagatcactattgacactcgtaccggtgagtatctgagccgctgcaagtaatttgacaaccaaccgaccgtacagaaaggagccgaacatggagatttctgaaaaggtagcatatctgaagggtctggccgagggcctgaacctggacaccgacagcaaggaaggcaagctgatcgccgccatcatcgatgtgctggacgacatggccgagaagttcgcggaagtggacgacgagctgtgcgatgtggaggacggcctggatgccgtcagcgacgacctgagcgatgtggaggagacgctgtactttgctctggacgacgatgaggatgacgacgaagacgacgaggaagaggagtgctttgtgaccacctgccccgagtgcgaggaggaggtctacttcgacgagactgttctggaggacggcgaggtcgtctgccccaactgcggcgccaagctggagtttgatctgagcgatttggccgccgccgctgaggatggcgaggacgaggagtaattcccatatataagcatatcccccggcattgccgggggatatttctttctatttacgcatttgctcaaaaatgccgggaaatggcggcggggcttgccttaacgggagaaaagcggtataataaaaaatactacactttgcgccacgcgcaaagaccgatttgaggtatacgaatgaaaactcaggaaaagctgaacatgaccatgctctgtgacttctatgagctgaccatgggcaacggctactttgaggccggctgcaaggagcgcatcacctatttcgacgtgttcttccgcaaggtgcccgatggcggcggcttcgccatcgcggcaggtctggagcagctgatcgactacatcgagaacctgcacttcaccgaggaggacatcgcctatctccgcgggcgaaatctgttctgcgaggaattcctggactatctgcggaacttccgcttcaccggcgatatctacgccattccggagggtacgcctgtgttccccaaggagccgctggtggtggtccgcgcaccggccatcgaggcgcagctgatcgaaacgttcaccctgctgaccatcaaccaccaaagtctgatcgccaccaaggccaaccgtatcgtccgggccgccaagggccgcacggtgctggagttcggctcccgccgtgcccagggggccgacgcggccattgtcggtgcgcgggcggcctatatcggcggctgtgccggtacggcctgcaccatctctgacgaggtgtacggcgtgcccgccggcggcaccatggcccacgcctgggtacagatgttcgacaacgagtacgaggcattcaagacctactgccagacctatcccaccaacgcgaccctgctggtggacacctataacacgctgaagtccggtatccccaacgccatcaaagcgttcaacgaggtgctcaagcctctgggcatcaccaagtgcggcatccgtctggattccggcgacttggcgtacctgacccgcaaggcgcgggagatgctggatgaggccggctggaccgagtgcaagatctccgtgtccaactcgctggacgagtacctcattcaggatatgctgctgcagggcgcgcagatcgacctgttcggcgtaggcgagcggatgatcaccgccaagtccgagccggtgttcggcggcgtgtacaagctggtggccatcgaggagccggacggcaccgtgatccccaagatcaaggtcagcgagaacgtggagaagatcaccattccccacttcaagaaggtgtatcgcctgtacgggcgcgacaccggcaaggccatcgcggactacatcaccgtgcatgacgagacggtggacgacacgaagggcctgaccatctttgaccccatggccacctggaagcgaaaggccgtgtataacttcgaggcccgggagctgctggtgccgatcttcaagaacggcaagcgggtgtacgattgcccgccgctggaggagatcaaggcatactgcgcccagcaggtggatactctgtgggacgaggtcaagcgcttcgactatccccacaagtactatgtggatctgtccgacaagctgtgggacatccagcagtgcctgctgcgcacgtcccagatgtaatcagaaagaaaatcagcaatagaaccgccgaggagaggaggagcccccgtgagaaagccgaaggtacagcagagaacagagcgccgtatatccgccgccctgcggttggtgatggtggcggtgctgcttttggcgcagatcgcgctggtggtcggcctcagcgaccttttgaagcagcgcatggcgctggcctacaccgcgctgcagctgctggccggtgtggtggccatgcgtatctggtcccgccccggggccaccagctataagatgggctggatcattctggtgctgttcgtgccggtggtggggctgatcctctatctgctgtggaacggcgaccggccgtccaagcgcctgagcctgaagaagccggtgcccatcgaggagccgctggcgcagcaggagctcgcccgcaccaatctggaaaagctgcggcagaccgcgccccagtggtatccgctggcagcgtatctcagcggcaagggctttgacctgtaccgcaacacggcgctgcgctatctgcccaccggcgaggcgtatctggaggatatgctcaccacactggatacggctcagcggttcatcttcctggagtactttatcatggccgaaggcgagatatgggatcggttgtctgatatcctctgccgcaagagccgtcagggcgtagaggtcaagctgatctttgacgatttcggcagcatgatgcgtatgcccaacgaaaaaatagacgcgctgcaggacgccggggtggaggtcagggtattcaaccccgtgcaccactacgtcaaccggctgtacttcaactaccgcgaccaccggaagatcacctgcgtggatggagatattgcctacaccggcggcgccaatatcgccgacgagtacgccaacctgatcgaacgcttcggctattggaaggactgcggtctccggctggagggcgagggcgcctggggcctgacccgggagttcctgcagatgtggcagcggatggacggtcagctgtaccatgagtacgactattatcgccccctgcaccaccccctggagcaaggcttctgccagactgtggtggacggccccgacgacaaccccaacaacgcagcggaggatctgttcctccagatgatcggccgcgcccggcgggaggtgtatatcaccacaccctacctggctatcgacgagcccatgctcaaggcgctgtgtctggccgcggaaagcggtgtggatgtccgcctcatcatgcccggcatcccggaccacaagtttgcctatctggtggcggagagctacttcgaccagctcatggcgcatgatgttaagatatatacctttacacctggccttgtccatggaaaaaccgtcctgactgaccgcgaggcggcctttgtaggctccgtcaatatggactaccgcagcttccagctgcacttcgaatgcggcgaggtgttctatggcacgcccgccatcgagacgctgctggaggatatggacaccaccatggcccactgtgcgcccatgacgccggagcgtatggcggagcgcccgttttggcggcgggcgatagggacgatattacggctcttcgccatgtggatgtaacccccgtctggtatatttccgccccggctgcgtcgaatatccaagaaaggaattatccatggcctgctttatcatcggcgcgggcagcttttacggcctgcctgtgtctgttcaaaggaccgatatggtcatcgccgccgacggcggctggcatacctgtcgggaaaacggcataacacccacgctgctggtggcggatttcgactcgctggacgccgcgccggcgtttgaccacatcctccgcttgccggtggagaaggatgacaccgacatgatccgggcagtcaaggagggcttcgaccgtggtgagagggagttccatctcctgggcggcatgggcggccaccggacagaccacacggtggccaatatgcagacgctggcctacattgcccgccggggcgggcagggctggctgtacggaaacggtgagcgcttcaccgccatctgcgacgggggcgagatcacactcaccgcagggcagaacagcgttttctccgtgttctgcctgggcgcagacgcggagggcgttaccatcgagaacgccaagtatccgctgaccgacgccgtgctgacggcggatttccctctgggggtcagcaatcattttataggacaggcggtgcgcgtcgcggtacggtgtggctgcctgcttatagggataacagataaggagtaacgaaacatgaaaaacaccatgaaaaagctgctggcgctgttgttggcactggtgctgaccctggccctggcggcctgcggccagaaggaggaaaacaaaactgatgaccagaccaacgaccccgcgatcaccgatcaggacaacgccgctgatgaaaaggtgacgctgccggtggcggacggcgcggtcatcggtcagggtgccgtggccttcactgtggaggtgcagggtgcggacggcaagaccgtcacctttaccgtcaacaccgatgaggagacggtgggcgcggcgctgctgaagctgggcgttatcgccggcgatgactccgagtacggcctgtacgtcaagaccgtcaacggcgagactgccgactacgatgccgatggcacctactggggcctctacatcaacggcgagtacgccatgaccggtgtggacgccactacgctggaggctggcacgacctacgccttccgtgtggagaaggtcgagggctgacaggtataaaaaagagacggcgcagccgtctcttttttataccttttccagtgactgcaccacatcgcccagcagatacagggagccgcagcagacggctgtgccatcgggcggcgtgtccgccagcattcgggacacaccctcccggatggtgtcgcaggccgttaccggcttgccatatcgccgcaggaaggccgccagctctccggcgtccagcgcacggggattgtggggggttacagtgataaaccgcgcggccagcggagccagctggtcgtacatttttccgtagtccttgtccgccagtacaccggtcagcaccgttaccggctggcccggcagatactcccggatggccgccgccagcgagaccatgcactgggggttgtgccctccgtccagaatgatcgtgggctgccgccgcaccacctgaaaccgtcccggccacgcggtctgggccaagccctgacggacggcactttcatcaatgtgccagccacgctgccgcagaacatcaatggtcgtcagcgccacggcggcgtttcgcagctggtggccgcccagcaggggcagccgcaggcccttatatgggccgtagttgaatatctgcccctccagcgtgtcgcagactgaggagagggcatcgaagtccgccacagtcagcggtacgcctgccgcgcggcagcgcacggccaccacctcctgtacggagggggcacaggggtacaggacggcatgacagccgggcttgatgatgcccgccttggtggcggcgatggcctccaccgtattccccagcactttggtgtggtccagaccgatgttggtgagcacggcggcctccggcgcggggatcacattggtggcatcgaattcaccgcccatgcctacctcgcataccacaatatcgcacatctcccgggcaaaccaggtcaggccgatggccgttaccagctcaaactccgtggggggatccgccatgcggtcagccagtgggcgcagttcctccaccaaggcgcacagggtatcgtcggggataggtgcgccgttgatctgcatacgctcattgaagcggaagatgtacggcgaggtgtacagtcccgttttatatccggcggcacgcagcacggaggccagcatggcgcaggtgctgcccttgccgttggtgccggtgacgtggacatactttacgtgccgctccggatggccaagcaggcccagcagcgtatcgatacggctgagcccgggcacactgccccgccagtccaccttgtggatgtacgccagcacctcatccagcgtcatggctgtcaccgcccttcgtctttatccgccgcagtaccggggagagtgcgttccgccgcatcagcagccacaccagcagcgcgtcgatacagccggtgatggcgaactgcacgctgcgggccgccagccgggtgaggaaatagggccatttggctgcaccaccgtacaccagcgccagagccatgctctgccagagcacggagccgcataccgccgcaggaaataccgccagcgccacccgccagagggtaggcctgcgccagacataccggcgcaccagccccgcccacaggccgtacagaatgggcggcaggcaaaagatcgggttgtagccaaagggggaaaacaggcagccgataaagtcggcggcaaagcccaccgcggcgccgggcagcggcccgaacagcagtccggccaggagaatgggcactgcctccagagagaagcggcttacttcgctgggaatgatggtcagcaatcgggccagcaccacgctcagcgcggtcagcagagcgcagaccgtcagggcataggtatcgaggaccggtgcgggaacggcgcatagttcttttttctgcataaaaaaatacctccttatccttgggatgggaggtatcaccatatagataacgacacaaactgccccgtggaagctggaatggtatcgcggcgcagatgcaccttcgtccggcggcagcctcccatccgtccggcacttaacgcaccatccctacacggaactgttcacagtatatacgcattcccgcggaaatgcaagaaaaataatcccacaagatatagacccgacagttgactacattccacaggatgatgtataatgatcgtgaatacataccgagatgcggcaaggagggcacagcatggcttttgactttaaaaacggttcctacaccgacgatgccgggcgcacggtccttgatcctgctgtttacaaggactggcagatcggtgcggcggcggagcaggccctgcccccggtggactggttccgccagaagctgggtctgctgccagaggagctgctgccctatggcaagacccccaagctggactttctgcggatcatggagcgcctgaaggaccggccggacggcaagtatattgaggtaacggccattaccccaacgcccctgggcgaggggaagtctactacgtctttgggcctgatcgagggactgggacgtctgggcgccaacgtgggcggctgtctgcgccagccttccggcggccccaccatgaacgtaaagggcactgccgccggcggcgggaacgccctgctcattcccatgacggagttctccctgggcctgaccggcgatatcaacgacatcatgaacgcccacaatctggctatgaccgccctgaatgcccgtatgcagcatgagcgcaattatgacgacgagacgttggccaaacgcggcctgcggcggctggatatcgatccggagcgcgtacagtggagctttgtgctggatttctgctgccaggccctgcggaaaatgcgtatcggccttggtgaggggaagatggacggctatcccatggacacctgcgccaacatcgccgtcagctctgagctgatggctatcctctccgtggcccgggatctggaggacctgcgccggcgcatcggcagcatcgtgctggcctatgacaagcagggaaggcccgttaccaccgaagacctggaggtggccggggccatgactgcctggatgcggaacaccatcaaccccacgctgtgctacacggtggagcatcagccggtgctggtccacgcggggccctttgccaacatcgccatcggccagtcctcggtcatcggcgaccgcctggggctgaagctgtttgattaccatgtcaccgagtccggcttcgccgccgacatcggcttcgaaaagttctggaatgtcaagtgccgcctgtccgggctgaagccggacgtgtcggtgctggtggctaccgtccgcgccctgaagatgcacggcggcggcccggaggtagtgcccggccgccccctgccggaggcgtatacacgggaggatctcgccctgctggaggcaggctgcgccaatctgctgcaccacgcggccaccatccgcaaatccggcgtcacccctgtggtgtgcatcaacaagttctgtaccgataccgacgcggagctggagttggtgcgccgtatctgcgcggagaacggcctgcgctgcgccgtgtccgatcactggcgctatggcggtgctggcgccgaagagctggcccgcgcggtcatggctgcctgcgacgagccctcggcgctgcaattcctctacccggacgatatgcctctgcgtgagagggtggagcgcatcgcccgggaggtctacggtgccgacggggtggactggtcgccgctggcgctggaaaaggcggtgcggttcgagtccgaccccaggtacgccgactactgcaccatgatggtcaagacgcacctgtccctgtcccacgacccggcccgaaagggcgtgcctaccggatggcgtctgccggtgcgggatgtgctggagtacagcggcgcccggttcctttgccccgtggccggcagcatctctatgatgcccggtaccggctccgacccggcctaccgccgcatcgacgtggacaccgccaccggcgctgtccgcggtctgttttaaggagggcgctatggacgataccaacaagacctgccgcgaatttgtggccgcgcttgcctcgtcagcaccgacgcccggcggcggcggtgccgccgcactgtgcggcgctgtcggcgcggccctgtgcggcatggtagccagcctgaccaccggaaaaaagaagtacgccgacgtggaaagcgagatacagcaattgctgaaaagcacaaacactttacatgacaaactgctggaccaggtccgcgcggacgcggagggctttcagcctctcagccgcgcctacgccattcccagggaggatcccacccgtgcggcggtgctgcaaagcgctgctgagacggcctgcaccgcgccgctggagatcatggctctgtgtgccgcggccctgtccgccgccggacgtctggcggagatcggatcccggctggcggtgtccgatgccggctgtgccgccgccatactgcgcggtgcgctggaggccgcggccctgaacgtgctggtcaatacaaagactatgactgatcggtcggcggccgaccatctgaacgcccggtgcttcgccctgctggatcagggcaggatcgacggcgaacgtgttttctgcgcggtgcgcgatcaacttgtctgataaggagggacgtgcatggccgttctgctgaccggaaagcctgtggcggatgcgatctccgccgatatccgtgcccgggccgaggcgctgctgtcaaagggtgtccagccccgtttggttctcctgcgctgcggcgataacgaggccgacggtgcgtacatacgcggcgccgtgaagcgcgctgcgctttgcggtgtggccgcggagctacgcaccctgcccgcggatgcctccgccgatgtggtggcggaagctatcgacgccgtcaaccgtgaccctgccgttcacggctgcctgctgctgcggcctctgccgccccatctgcgaggggaggagagcgatctctgtgcccgcctggcgccggacaaggacgtggacggtatgacgcccgagagcgctgccgccgtgttcaccggacaggggagaggtttcgccccctgcaccgcccaggcctgtatggcgctgctgcgccactacggcattgccccctgcggcaggcacgctgtggtcatcggccgttccccggtggtaggccgtccggtgtccatgctgctcctgcgggagaacgccaccgtcaccgtttgccatacaaagacaccggatacggcggcgctgacccgccaggcggatattatcatcaccgccgccggtgcggtcaacagcctgaccgccgcccatgtccgaccaggccagaccgtgctggatgtgtccatgaactggaacggtaccgccctctgcggcgacgcggactttccggcggtgtcgtccatcgtggatgccatcacgcctgtgcccggcggcgtaggggctgtcacctccgcggtgctgatggcccataccgtccgcgcggcggaatatctgacaggggagggcggcgcatgaacgtctttactcccgccgagacagcggccaactatgctgccgccggtgtcctcaagacccggcagccctttttgaagctactgcttttgggcattgccgccggagcgctgatcgggtttccggtctgcgtcaccaatatggctacctatgccatcaccaacgccagcgcggtccgtatcatcgccggcatcctatttgccttcggcctgggcatcgtggtgctcaccggtgccgagctgtttaccggcaataccctcctggtcatcagtctgctggacaggcgtgtgacctggggtgccatgctccgtaactggggcattgtgtatctgggcaatttcctcggcgcgctggccctgagctgggtctgcgcccgcttcggctggctggacgcgggagacggcgcgctgggcgcttataccgtgcagctggcggtagggaagatgaccatgcccttcggcaaggccttcttcatgggcgtgctgtgcaacattctcgtcacggtcgccgtgctggcgagcctgtccgccaaggatgccgccggccgtattctgggcgcgtgggcgccagtgatgttctttgtggtggccggcttcagccactccatcgccgacatgacctactgtgcgctggccctgttcggtaagtccgcgcctgcctgcgccgcagcggcgcaggccgccggcgcggacctgtccgtcctgacctgggggcactatttcctggggaatatgctccccgtcacgctgggaaacacggcgggcggcgggctggtgggccttgcggcctggtactgctatctccgcaagaaaggataacgttccatgaatatgtttttgaccctggcttacttattcttcattggctccacccttggatgggtggctgagctgctgtaccgccggtttctctccggcgcaaacccggagcgtaagtggatcaaccccggcttctgcgtggggccctatgtgcccctgtacggttcgggcctctgtattctttatctgttggcctccatcggtgaaaaaaacggtgtggatacggtgggggagaagctgctgctctttgcgggcatggccctgagcatgacagctatcgaatatatcgccggtatcgtcagcctgaagttcatgcacatccgcctttgggattacagcaagcagtggggcaatatccagggcctgatctgcccggccttctccgtcctttgggcggcggtcagcgccgtgtactacttctgcgtccatccctatatcctggacgcgctggattggctgtcccgcaacctggccttctcatttgtcatcggctttttctttggcgtgtttaccatcgatctggtctattccgccaagctggtgtcccgcatccgcaagttcgccgacgagcacgacgtggtcatcaaggtggagaacctgaaggcccacattcgccagcggcaggaggagcgccgcgagaagtacagcttcctctttgcctaccgctcccgcagcgagctgctggagcatctgcgcgaggcgcaggagacttgggaggaaaggcgccgcaagtgatattgctttacaggagactgcccgatgcatatgactgtcttgtttgcaagtccccgtgcggcgcatagcaacacccgcgccctgctggtgccttttctggagacgtggcgtgccgccggccacacggcggaggtgttttcgctctttgatctgcacattgagccctgccgcgcctgccgcggctgtcaggtggactgggagcatcctgcctgcgttctggcggatgatatgcctgccatatttgatgccgccctccgcagcgatatcctgctgctggccgcgcccatccactcctggttctgccccgcgcccatgaaggccgcgctggaccgcttcgtctatgcgctgaataagtactacggtccccgcggccgcggtccgtctctgctctccggcaagtctctggccattctgaccacctgcggctaccggccggagaagggcgcagacctgttcatcgaggggatgcgccgctggtgcaggcacaccgatatgcgctatgtagacgcattgaccgagcgccacctgggctacgatcacacgttcatggacgcggaaaaggaagcccgcgcccgcgcctttgcccggtcgctcatgcaggcataaaaaacggccttcggtacaataccgaaggccgtttttgcgtcaatgcaggtcctgctgcttcatccatacatccatgaccacgctgtggggcagcagcttcgtcagccctgcctgtacccgcgccacaaagccgtacttgcacacgtccttgccccgcttggcgtcccgccaggtgcgtgctacaatgtcgtccggatcgtacatggccgcgtatttcttcacaatgggcgtctcatccgacttgatggcccggtcaaagaacgccgtctttgtccagaaggggcacaccgccataacgccgatgccgcggcttttcagctcccggttcagcgcccggctgaagctcagcacaaaggcctttgtggcaccgtagatatcgatataggggatgggttgaaaggccgccacggaggcgatgttgatgatctggctgccccggggcatatagggtgcggtgatctggcacatggccaccaccgcctggcagttcaggtccgtcatgttcagatttaccgccagcggcgtgtcaagcacggcgctgaacttgccgtagccgctgcaattcatcagcaggcccacctccaccggtgtctcggccagtgccgcggcatatacatcgaagctgctgcggtccgtcaggtccagcgccagcacgcggacggggaaggggaccgtggcgcgcagggcctccagctgtgcctcatgccgcgcgatgacccacacctcgtcaaaggtgccgtaccggtccaccgtctcggcgaaccgtttgcccatgccgctggacgcgcctgtgatcactgcgatcttcttcatacgatagccctcccggtcttgttatatccctactgtatcccattttttggctgccgtcaaccggttttccccgcccgcggcacaaaaaaagaacacgccttacggcgtgttctctcggcgctttcggttacgcggcggcgtgtgcgggcttgttctcgtgcttctcctcgcggctgcgctccagcagcagcgcgcgggtggtggaagcggtgaacaccacagcccagaacagggtgacatactcgccgatcaggcgcatacccgcctcgggagccgtcatcaaaaaggcggacgcgatgaccagcaccagggaaacaacggcgatagcgacgtgcgtagaaatgtttttcatggtaacatcctccttgaaaaattttatgtgagttttgttgtttttttggtttcaggctcttgccttcctgttgatgctatagtagaatatttcacaggaaaagtaaagctgtactttgttatagtgcttgttagaaatactaatagcttggaaggaggaaaaaccatggagaccgcccgctgccgcgcctttctggccgctgccgagaccggcagcttttcccgtgccgccgagatgctgcgctacacgccctccggcgtcaaccagctggtcaccgcactggagaaggagatcggattctctctgttcagccgcagcaccaagggcgtggcgctcacggccaacggtcagctgctgctgcccgttatccgcgagatacttcaccaggaggataagcttttcgagctgtccgcccagatgaacggcctgctgatcggcaccgtcaccatcgccgcctattccagcatcgccacccattggctgcccgctgtcatccgggattttcaggagaactacccccacgtggagatcaagctgatggagggtatctggcaggaggtgtcccagtggctggaggagcgtaccgccgatatcggcttcctcagctatcaggagaatatgcccttcgagtggatcccactggccgaggaccccatgctggcgctgctgccccggaatcatcctctggccggtgccgactgctacccgctgaagcggtgcgagcaggacagcttcatcatgcccgccctgggctgtgatgacgacgtggaggcgctgtttgcacgcaatcacgttgatcccaacatccgctataccaccatcgagaacttttccgccatgtccatggtggagcagggcctgggtgtcagcgtgatgaacaagctcatcaccgaaaagcgtatctgcgatgtcgccatgatccccatcgacccgccggccagcatcacgttgggcgcggcactccactcccgggcggacgcctcgccggccgtaaagatgttcctgaaatacgccgtccgtatgctgacaaagagcgccgtctgagcctatcggaaaatcttatatccattcagtgttccccgcttgcggataccctgtggaatagggtatacttactttaaataacaaaagggaaggagtgcccctatggataagcgcattctcgtcatcaaccccggctccacctctaccaagctggccctctttcagggtgagcaaaagctgtttgacgccgccgtgcgtcacagcaaagaggacctgagccccttctcctgggtcatggaacaggcggatttccgccagaccgccattgaaaaggaactgtccgcccacaatgtggacctgaccacgctggacgccgtctgtgcccggggcggtcagctgccctactgtgccgccggtacctacctggtggatcaggacatggtggacttcatgtacacggtccgcgatgcggcccatgcctccaatctgggctgcgtgctggccctgcgtatcgcccgtccgctgggtatccccgccttcatctgcgaccccgtcaccgtggacgagatgaccgatgaggcccggatatccggacacccggtgctgccgcgtatgatgaccggccacgcccttaactgccgcgccatggctctgcgctgcgccgagaccgccctccacaagcccctggccgattgccgactgatcgtcctgcacctgggcggcggcgggtccgcccgcctgtttatcggcggcaagatggtggacggcgtccgcgatgacgagtggatgttcgccccggagcgcatgggcggcgtcagccttcagcccctggtggccatgtgctattccggcgcgtacaccaagcaggacatcatggacctcatccgcggcaagggcggcctgatggcccacctgggcaccgccaatgcccaggaggtggagcagcgcatcgccgacggcgacgcgcacgccaagctggtctatgacggtatgctgtacagctgcgcccgggccatcggcggccttgccgccgcggcggatggccgcgtggaccgcatcatcctcaccggcgggctggcccactcccactatgtgaccggctacctgacgcaaaagctctccttcatcgccccggtggaggtcatggccggcgagtttgagttggaggctctggccgccggcgcaagccgtgtcctcaatgggcaggagcagccacgccgcttcgccgacatcccgcaggcataaaaaaacagccccggccatcgccgggactgtttttttatgctctttttcttccgcagacctggtacatctccccattggagatcaccgtgtctacgtccagatacggcgccatcagcgcccggacttcgtcctcgtgcagcagacccagggataccggcttcgcgctgccgctgtggtgggcatccagcgccgcccggctcatgccgtgggcgatggacagatgcccgccgggccggaccagctctgccagcgtccggatcagccccgccggatcgggaaagtgcgggaaggcgttatagaccatcaccacgtcatagggcccgctgtcccgcacggcggcgctatcctccacatcgccgcataccaccgtgatctgcgtcccggcggccttttccgccgcccgcgccgccatctccggcgacaggtcgacagccgttacccgcgccgcgccgcgctttacatagtcgccgaacagcacgccggtaccgcaggccacgtccagcaccgtgcagccctcgcataccccggcgttatccagtatccgggcgatgaccgcctcattccgcaccatgcccgcgtcccagtccggtgccagccggtcaaagaacgcctgtacatcccgtttgtcgatcatgccgccgccctcagctgaagaaggtggccgtgtcgatctgctgatagccgccgaagctgttgggcatccgatagatctcctccgcaatgcccttgcccaggaaagcgccggtgatctcgttgagcttctcggtcatgtcaatgtccgtgaactgctccggatagacgcacttggcggagaaccaggcattggccagcgcgatctcatagttggtgtagtaggcgttgtacgccatttgcagatacaccttgccctcctgccacgccttgcagctgtcaaacaggccgttgtcctccgcgtacaggggcttgatgtttttcaccgccgccgcgtcgatgagcatgatgtccatgtccggtcccagtgccgtgaacttctcggcctcgatgggctgtacgcccttggcgctcagtccgctgacggtgttcttgatgttcgccacggtaaacgtgctgtagctctctatggtcatcaggtggttggtggtgccccagttgcccagcccgcagatgtacaccgccggcttgctgtcctcggcgatatccgccgtccgggcctgaatgtccgcggtctccgtgctgacaaaggccagcagctccgaagcgcgggtctccttgccgaacacctgacccagcagggtaatggagccgctgaaatcctcgctgaacacgccgtccacgccggtccgcagggtgatgaccggcacacccacctgctgctgcagggcttcggccttatctgtgtcctcatactcggagacaatgatatccggcgtacaggacaggatcttctccgcctccgccgcctgagcgttggggccgcccacgccgcaggagggcagggcggcgaaggtatcgccgtacaccatcacatagggacgcgccacaccgtcgaacatcttgggacgctcctccagcgtggtgttgtcgatgtcctccacaccgcacagcaggctcacgtcacccacatagctgtatagccgcagcgcgcctgcgccgatgcacaccacccgctggtagctgcccggcacgatctccacctggcggccgatcatatccgttatcgtcacggttttcggtgcgtcatctgtgccatcctccgcgggcttctcgccgcagccgaacagcgttagggtcatcatcagcgccagcaccagggccaaaactctcttagtaatcatcttcgtttactcctatcagtattttctgtccgtcgatctccgccgcgcgcacccgcgcaccgaatatatcccacaccgtctccggggtcagtatgtccccgtttccggcgtatcgtacctgtccgtcccgcatgaggaacagcctgtcaccataggccatggcctggttcaggtcgtgcagggtgcacagcaccgtcatgccccgtgtccgggccagccgccgtgcctgccgcaggatccgctgctcgttggccacgtccaggttgcctgtgggctcgtcgaataccagcagcttcggctcctgggccagcgcccgggcaatggccaccttctgcctctcgccgccggacagcgtctgcacattccgttccgccagcgccgtcaggtccatgtccgccagcgcggcctccgccgccgtacggtccgccgcaccgggctgtatgccgaagcggctcacccgcccggccagcaccgcgtcgtatacacgcagcgcgccgaattgcagctcctggggcacgtaggccgccacctgggcccgctgctgccgtttcatggcgcccagcgcctgtccgtcaaagaggatctgcccctgctccggtgtacacagccccagcgttgttttcagcaatgtggttttgccgcagccgttgcggcccagcagcacacctacctgtcctgtttccagtgacagactggcgtcccgcagtaccggtgcgccccgccgttcatagcggaaggtcacgtgttccaccttcagcatacaccgccctccttttttccaaagatcagcgtcaggaaaaacggcgcgcccaacagggaggtgatggcccccaccggcagggcggagccgctgccgatactgcggctcaccgcgtccgccgccagcagcagcgcgccgccgcacagggtcgccgccggcagcgcccaccggtggtcgtggcccaccagtcgcttgaccgcgtggggacagatgatacccacaaagccgatcatccccaggaacgacacgcacaccgccgtgatgagcgatgccagcagcagggatacccaccgcagcagcgccacgttcacgcccatgctgcccgcggcatccccgccgctgagcagcgcattgtaccgccaggccagcgccgcaaagaccgcgatccccgccgccgtcaccgccagcatgatccagtcagcccggtatgtagcgcggcccaggtcgccgaagctccagatcaccgcggcggacagccccacatccgtggcgtagaactgcaagatcgtggtggccgccgtccacacagagccaagtgcgatacccgccagcaccaccacgttgggggagaagtcccgcagccggcacagcgccagcaccaccagcacagagcccgccgcaaacacaaaggccagcgccgacgtggcaaagggatctgctcccgccgtatagctggtcaggttgttgccggtggacagaaacccgcccgacagtgcgatgatggacaggttcgcgccgaacaccgccgcgttggacacgcccagcgtggcgggggaggccatgggattgcccagcaccgtctgcatgataagtccggatacggataatcccgccccggcaataacggcggccagcagccgcggcagacgaatgtgctgcatgatccgcaccgccgcgctgtccccgctgccgaacagcgccgaaacgcactgccgcaccgacatcccggaggaccccaccagcagctccagcaggaccagcagcaccaccgccgcagccagcgccgcgaccaccgctatttttcttttccgtgccccgtcagcgcccatgtcctgcctcccgcgattatatatagtgtatcatacctcaattttctccacggcgcaacccgggtagggggttccgatcatgccgatatctcatatttctcaccgaattcgtccacccaaaccgtgcggtccctcttgacaaaccacctgccctgcgccatagtatacctatcagttttctttataggtggtgccgccatggatatccagaaattacaggccctggccgtcattcaggaggccggcagcttctcccgcgccgcagagacgctgggctactcccaggcgggattgacctacatgatgaacagcctggaaaacgagatcggcctgcgcctgctggaccgcagctacagcggcgtccgcctcagcgagacaggcaagaccctcatacccaagatccaccggttgctgcaggtctacgatgccctgaacggcgagatcaacgcctgcaagcgtgcccagcaggccacgctgcgcctggcggcgctggacaccgtctccacccgctgggtgccccgggccgtggcggcgctgaagtccgagtatcctcagatcaccgtcagcgttatctccggcagtcccatgcaggtagacaactggctccgcgacggcagtgtggagctgggcgttaccgacaagcgcttcaccggcacggatatggactggatcaggctctgtgacgatcccttcctggccgttctgccgccggacagcgatgtaccggaccccgtgcccgtgacctggtttgccggccgtgccgttatcatccccgactacggcaccaacaccgacaccacccgcgtgttcacccgtgccggcgtggagcccgtctacaccgatgaccgtatgaacaaccgttctgtcctggccgccgtggccgccggattgggcagcaccgttttttcccggctggaactggactattacgcccgccaggatctgaccgtccgcgccatggacccgccctgctgccgcgaactgggcgtggccctgcgccccggcgtcaagggcgacgcggtggtccgttccttcctccgtgcccttcgtgccgccgccgacgcggaccaataagcaaaaaaagaaacgcccataggcgtttcttttttgcttatttgaagaattcgaaccgcggctgctccttcgttacggtgccggtctcgatctccagcccctcgccgaagtattttttcagcagcgccaccagctcgtccgccgcggcctgcacctccgccgcgttcacatcggagaaaccgtcgatggggaacaggatggccttggtgttctcggtgatcttgccgcgctcggactgccgccaggtccaccgccgggtccgtatctcgtggccgcaggcatataccgcctcgcctacgtccggagcctcctcctcggtggagccgaagggaatgaatgtgtcgccctcctccgccagccggacgtccagcccgcctgcgatggtgtccagatcgtgggcgcccatgggcagcctatgcttgatggacaccgcgttgcccaggtccaccgccgcgttgatgtgggggaagcccttgcccttggcgatacgggtcagcagcgcctcgatggagcacataaacttattggggttgatgcccagggcggtgaacgccgcccgatagggcaggatatcctccgtctccttgggctttttgccggtgaaataggcctcgcactccgccacattcccggccagcattttctccagctccggaatgtcatgggtgttgtccagcccgcgcgccgccaccgcgccgaagcaggcgttgggcagcttatcgaagaattcctttgatacctggtaatacacagcgtttcctccttgtctgaagtatgtgtccgcggcctccccggcagggaggccgcctgtttttgccgatggcatattctaacgctttaaagggtaaaaatcaagccctttttatagctgctcccggcccagcttcagtccaagatcaaaggcctgccggttcagcggcagcagcgccggctttttgctcagcttgtgttctatggtgcgccacaccacgtcctccggcaccacctgggtatagcccacgtacacgcccagcatgatgatgttcagcaccttggcactgcccatctccagcgccagctccgtcaccggagcctttaccaccttgatatccgtgcgcgtgatctcgctcttgacgatggagctgttgatgaacagcgtgccgccgggcacaagcttatagaggaacttgctgaggctgggatcgttcatgacgatgaggtcatccatatgatcgcccaggggcgcgccgatgtcatcgtcggagatcaccacatagcagttggcggtgccgccccgctgctccgcgccgtaggaggggaagaacgtcacatttttgtcggtgctctcgcaggtggcctccgccaggaacttgcccagcgtcatcacgccctgtccgccgaacccggcgaccatcagatttcgttccatcacgcgccctccttatccttgtcccggatgacccccagggggaactccttgaacattttttcctccagaaagcccagcgcctccagcggctccagtccccagttggtgggacagctggtgacgatctccaccatagagaagcccttgcccgccagctggttctggaacgcctttcggatggccgcctttgtcctgaccacattggcggggttgttgcagctggtgcgctccagataataaggcgcggtcagctggttcaggatctcacacatgtgcatggggtagccgtgctccctgggatcacgccccttaggcgcggtggtggccttcatgcccaccagcgttgtcggagccatctggccgccggtcatgccgtagatgccgttgttaacgaagattacggtgaaattctcgccccggttggcggcggacatggtctcggccaagccgatggaggccagatcgccgtcgccctgataggtgaacaccagcttatcggggttggcgcgcttgacaccggtggctaccgcgcaggcacggccgtggggactggtggtgcagtcataggtgacatactccattgcaaggccgcagcagcccacaccgtggacggtgatggccttttccagcacgcccagctcctccagtacctcgccgatcagcttaaagaccgtaccgtgcatgcagccggggcagaagcccaccaccatatcgtcacggatgccctttgttctcgcgtataccttttccatcatgcaccctccttgtccagaatggccttggccgccgctaccgcctgatcgcggctcatgatctcgccgccgctgcgcaggcaggtatagatggggcagcgctccttcaccgccagcgtcacatccagcaccagctgggcggggatggacatttccacatccagcaccgctttgacgcggctgtaatccagcttgtcgaagctggcatagggccacgggctgacggttttggggcggatcaggcccacctgatagccctgagcgcgcaggatacggacggcagacttggcgatacggccgcagacgccgtaggcagtcaggatcagctccgcgtcctcggtcatgaattcctccacctgcacgtccttttcccatgtgtcgtacatggcggcgttggccttgcagcgatcctcctgaccggtccagccgccgggcaggatcagcgcctttttgtcggcgggatgtcccaccagcgcccagtcgctcagttcgtccttcaggcgcttgacctcctcgtcagagcgcatctccggcaggctgaccggctccatgatggtgcccagcacgccgtccgtcagaatgaggacgggattgcggtcacgctgggcgtaatcgaaggcggcataggtcatgtccaccgcctcctgcaccgtggcgggggcgaataccatcatccggaagccgccgttgccgctggcacgggtggcctgcaaataatcctgctgggcgggctggatcgcgccgattccggggccgccccgctgtacgttgacgtataccatggggatgcgggcgctggcgcagaagctgatgccctcgctcttgagactgatgccgcaggaggaggagctggtcatggcgcgggtgccgctctgagcagcgccatagaccatattgacggaggctacctcactctcgccctgcacgaacacgccgcccacctccggcagccgccgtgccagatattccggtatctcgttttgcggcgtgataggatagccggcgaagaaccggcagccgctgcgcaccgcggcctcagcgatggcctcagtgcccttcataaatactcttgccatgctcccgcctccttatttatacacttcgatggccgcgtccgggcacatacgcccgcagatggcacagccgatgcagttttccgggtgtgcggccaccacaaaggggtagcccttggagttgacctcgtgtcccacggccagcacgcccttgggacagaacttcacgcagtagccgcagctcttgcagctctccgcgcggatggtgacttgcgccatttcaatgcctccttatccttcatcaagtcccgtctccgggacggtcattcgcggtgtgaggggcagcagcggcagctccgtccggccctcgacctccggcagcagcgtttccgacaccgccgccgcctccacctttacatagggcgtcagcagccggagcccctgctccacgcccactaagaattcctccgccgtggtgccgatgcccagcgtggggttcagcaaaaaacgcggcaggcccagccgcgccgccttcagcacggcgctcagggtcccgtcgatgtgctccaccgtccccgaccagggccggtatggatttaccacgaaccatgcgtccgcactcttcagcaggtgtgcgtatccgccgatgagccttgcccccgtgtcgttgccgcccacgtccagaatgacgcttttgttcttgtccagcagcagcggcaccagtccgcccacctgcgtgggcgcgtcggcacactgctgctcgaagtgcaccgtcacccccgcgccctccaaaagggccgccgcgtcccttgaccgcagcagtggctttgtctggtccagatcgaagaaatgcacatcccgtccacgctccgccgccgtcagcgcccactgcaccgccagctcagatttgccgcacccggcctcgcccagaaataccgtcacccgctgcgctgggtccggcgcataccgtgccataccatccctcctttagcccttcaaagtgctgtatatttacgaataccattatacccgcccgctttgcccctgcgaagcgtaaatgcccgttatcctataaagttttcttatatctaacggcgtaaaaaaagaccggcacccgccggtcttttttcatatgcttatccgcccagatacgccttcttgatggcgtcgctctccagaagcgccgcgccggtgccctccgtgacgatgcgccccgtttccagcacatagccccggtcggccaccgccagcgccgcctgtgcgttctgctccaccagaagaatagtggtgccgtcggcgtggagctgacggatgatgtcgaatatctgctccaccagcagcggcgccagacccatggacggctcgtccagcatcagcagcttgggatggctcatcaacgcccggcccatggccagcatctgctgctcgccgccggacagcgtcccggccacctgcttccgccgttccttcagccgcgggaagcgctcgtacacgctctcgatgtctgcgttcaggtcaccgctccggcaatagccgcccatgtccaggttttcctgcaccgtcatgtgctggaaaatgcgccgtccctccggcacaagagccatgccgcgccccaccagcttgtggttgggcacgtgccgcagctcctcgtccatgaagcgcacgctgcccatgcggctgcggagcagccctgccacggtgttcagcgtggtggattttcccgcgccgttggcgccgatcagcgtcaccacctcgccctgctccacgtggaaggacacgtccttcaccgcgtggatgctgccgtagtacacattgatgttctccacctgcagcacgctgctcatgcgctcgcctccttcttccgtcccagatacgcctcaatgaccgccgggtccgcctggatgtccgccggcgtgcccttggcgatgatgtgcccgaagttcagcacgcagataccctcgcagatgttcatcaccaggttcatgtcgtgctcgatcagcagcaccgcgatctggaacgtatcccgtatcttccggatgttctccatcagctccgccgtctccgacgggttcatgcccgccgccggctcgtccagcagcagcagacacgggttcgatgccagcgcccgcaggatctccagccgccgctgcgcgccgtagggcagcgagcccgcccgttcatcggcatgactctccatgtggaagatgctcagcagctcctccgtccgttcccgggcgatgtgctcctccctcgcatacctggggaaatgcaggatactgcccgccagcccgtagcgcaccgagtcgttcatggccaccatcaggttctccgccaccgtcagatcattgaacagccggatgttctggaacgtccgggcgataccggccttgtttacctgtgcggtggtcatgctgtgggtgtccttgccatccagcaggatagcgcccgctgtgggctgatacaccttcgtcagcaggttgaacaccgtggtcttgcccgcgccgttggggccgatcagccccgcgatctccgtccggccgatggtcagatcgaagtcctccaccgccttcagcccgccgaaggtcacgcccagccccacgcactccagcaccggggacttgtcgatgtcccgttccggcagcagcacggaggactggcgcttcaccaatttcgttttcgtcgtcacagcgccgcacgctcctttcgcccgggggtcagtttttccttagcagaggcaaaaaaccgcttcatcgtggggttgttcgtggcctgcatcaccaggatcagcacgatggcatacaccagcatgcggtagtccgccacctcgcgcagcgcctccggcagcaccgtcagcacgatggccgagatcacggagcccggcacgctgcccatgccgcccagcaccacgatgaccaggatctcgatggacatattgtaatcaaaggcagctgccttgatgttggccagtgagtggccgtacagcacgccggcacagcctgcgaagaaggctgcgatgacgaacaccgccagcttgtaccatgtgacgttcaatcccacggactccgccgcgatgcggttgtcccggatggccatgatggcccggccgtacttggaccgcttcaggttcagcatcaccgccaccgtcagcagcaccagcaccgcgccgtaggggagaaggtccttcgccccggcgtagatggaggaggtgtccagacccagcgcgccgccggtgatgttcaggtttgtgatgatgttcttgatgatctcgccgcaggccagcgtcacgatagccagatagtcgccccgcagccgcagggccggcagtcccaccagcagcccgaagaccgccgccatcaggccgcccgccagcatactcaccggcaggcgcacgcccagcggcagggcggtggtgtgcagcgcgatcgccaccagacacccggagaacagtcccacggacatgaagcccgcgtggcccaggctcagctcgcccagcaggcccaccaccaggttcagcgacaccgccatcacgatgtacaccgcaacgggcaccagcatattcgttacctgccgggtcagatgcccggtatacagcagcgtcgccattaccacaaacagtgcggccaccaccgccacggtcagcaggtccgtgcgctgtctttttttctgtgtcagctgcatttccttcacctcacaccttctcctgcatgggcttgcccagcaggcccgtgggcttgaccaccagcacgaccaccagcacggcgaacacgatggcgtccgcccacagggtggagatatacgtcttggacagctgctcgatcaatcccagcaggataccgcccagcatggcgccggggatggagccgataccgccgaataccgccgccgtaaaggccttgatgccgggcatggcgccggtggtgggcttgatgtacacataggtcatgccgtagaacatactggcgaaggccgccagcgccgagccgatggcaaacgtcagcgtgatggtcctgtccacgctgatgcccatcagcgtggcggcgtccttgtcctcggacacggcccgcatggctttgcccagcttcgttttgtcgatgaacagcgtcagcgctgccatcagcaccgctgtcaccgccagcgtcagcacggtgatgccgtccacctgcacgccgcccacggagaagctgcccagctttaccaatgtggggtaggccatctgctgcgagccgaagagcagcagcgccgcgttctgcaaaagatagctgacgccgatggccgtgatgagcacactcagcggtgccgcctgccgcaggggcttataggcgcagaactcaatgaccacgcccaacaccgcgcataccacgatgctgacgatcaccgtcacccacggagacagtcccagctgcgccaccgccacaatgccgctgtatgcgcccaccatgatcacgtcgccgtgggcgaagttcagcattttggcgataccgtagaccatggtgtagcccagtgcgatcagcgcgtagatgctccccaggctcagcccgcttatcaaggtttgtatcaaattcgtcatagtcgtcattcctttgcatggcgcccgttccgccctcccggcacagcgccgggagggcgtatgggcttattgtgaggaagataggtagcttacttgcttacgcctccgcgtcggctgcagtatccgcagcgtccccgctctccgcgccggcggcgtcattggcgttgccttgaccgaacagggtgcccacgccgttcttgtagaggatggcgctggcggccttgttggtgttgccgtcggcactccaggtcatagtgccggtcacgccctccacggtgatggtgggcatcacagcggccaggtcagcgccggaggtgctgccgttggcggcctccacagcggccttgacggcgtacaccgcgtcataggcatccgcggcgaactggtcgggggtggcgttgtaggcgtcctggtatgccttcacaaaggcctggaccttggggtcagcggaatccgcggcgaagggggtcatcatcagcacgttatccgcgatggtcacatcctggctcaccttgcccaggatgccgtccagaccgtcagcgccgaagaagtacacatcatcggcaaacttacccttggcctgggtcaggaaggtggaggccccctccgcgtagatggggatgaacacgaccttcacgccggaggaagcaagggcgttcacctgggtggagaagtcggtgctggtggcggtggtgaaggtctgcgtctccttgatggtcacgccgttgttctggcactcggccacgaaggcattgtacagacccacagagtagtcgttgtcgctctgatagaacacgcctacctcggtggccagggcgttgtcggtgaggtagtctgctgccgcggtgccctgataggaatcgtagaagcagatacggaaggccttgtcgttgccgtcgatgcacttgtcggcggagccggtggtctccatcaccagcacgtcgtcggctttggccgccgccaccacggaggccgtctcaccggacagcaccgcgcccagactgacgttcatgccccagtccatcagcttgccgtaggccgccacggcgctctccgggtcgccctgagagtcctggaagctcagctccagctgcttgccgttcacgccgccggcggcgttgatctccttgacggccagctccgcgccgtgctgtacggacagaccatagttggcatagccgccggtcagggggccgacgccgcccagcttaatggtctcggcgccgctggcgtcgccgctgccgccgttatcgctcttgctgccgcaggccaccaggctcaacgccatcacagcggctaaaaacattgcaactactttctttttcatggttttgttctcctttacgttggttttcttaggaactatgcaccggcggcgtctgccgcaggtatacaaaaaagcggctccgccaatggcggagccgcttcgctgtatcaggtgtcagcgcgtcatgcggttatccgtgccaatggcgtatgtgcagaggcggccagtaccagcagtaccagcaccagagcgcaaataataatggacgccataataatggcgcccagcacggacaggatgacagtatgagaagcggcgcaggcgcagcagaaagcagcaccggcgcaggcggcggtcatcatggtattcatggctttcttcgtggtcctggtcatcacggccgcctcctttcgcttcggaaatgttgggcctattgtagcaaagcaaaattccaaagtcaacggtgttttcacaaaaaatgccatcatatcgcacaatcagccacaatatgcattatgcaatatgcataaaaacgaaccactttctcccagaaactggaaattccacggccgcagccggtctgccgctccgaacacaaaaaacgatatagacggacaaacatacgacaataccgaacaacaccccttgcattttctgcgttatcctgtaaaatagacagcgacccttcgcgcggtacgcgcggaagcggaacagactgaaaagggaggcccgtccatgcatacgccccggcaccccacacgcagcataacgatcatggcgtcagcgctgctggcgctgtttctgctgtccttcgtgctgggccgctacggcgtccctctgggcgaggtggtaaagatactcctctcccgcgtatttcccattggacagacctggacggacaacatggccatcgccgtgtggaacgtccgcctgccccgcatcctgctggcctgtctggtgggctgcggcctctccgccgccggcaccgcctaccagaccgtgttccagaaccccatggccgcaccggatatcctgggcgcgtcctccggtgcctgcttcggtgcggcgctggcgatcctgacgggccagagcaccgtgatggtcaccgttttcgccttcctagccagcctgctgtccgtggccctggtctatctggtgggccgccgatcccggggcagccgtgtggtgagcctcctgctggccggtatcatggtaggctcgctgttctcggcctgtacctcctatatcaagctggtggccgatccctccaaccagctgccccagatcacctactggctcatgggcagcctctccggcacccgtatgcacaccgtcgcctttgccgccgtctgtatggcggcagggctgacgcccctgctgctgctccgctggcgcatgaacctgctgaccctctcgccggatgaagcccgcgccatgggcgtccacacggaccgcctgcgtctggcggtgatcctctgcgccacggtgctgacggcctccgccgtctccgtctccggcatgatcggctgggtgggtctggtgatcccccatctcagccgccgcctcgtgggtaacgactgccgcaggctcctgcccatggcctgcctgttcggcgcggcctttctgctgctggtggacgacctggcccgcacccttgcggcgacggagatccccatcggtatcctgacggccttcgtgggcgcgccgttctttatctacctcatggtgaagggaggcgaccgcctgtgaccctcacggtatcgcacctgaccttcgcttatcccaaggccccgccggtgctggaggatgtctccttcaccgtgcccgccggtgatttcctctccgtgctgggtgccaacggtgccggcaagagcaccctcttccgctgcctgctgggcggcctggagggctacaccggcgccatctcgctggacggccgcgacgtgcggaccttctcccgccgggagctggcggcccgcatcgcctacatcccgcagatacaccgtcccaccttcggctattccgtgctggacactgccctcatgggcctgacccggcacttgtccccgttccagagcccctccaaggccctggagcagcaggctctgaccgccctggagcagctgggtgtggcccacctggcgcagcggaacttcgccgccctctccggcggcgagcagcagctggtgctcattgcccgcgccctgtgccagcagtcggatctcctcatcatggacgagcccaccgcctctctggattacggcaaccagctccgtgtgctggagcaggtgcgttccctgtcggagcagggctacaccgtcctgctctccacccacgatccccagcacgccctgcgtttttcccgccgcgtcctggccctgcaagggggccgcgtggcggcggagggcgatacccgggacgtgctgacgccggacctgatccgacagctctacggtgtggagtccgtgctgctggatacgcccgacggcgcggccctgctgccggtgcggggaggtgaccgccatgtttagctggtcggcggacactgtccgcttcatggccgatgcctgccgccgcaccgacttccacgaaaagctgacggcgctgctgctgccgtacctgaagcccacggatcatatctgcgacgccggctgcggcctgggatacctgtccctggccctgtcgccctatgcggcccgtgtcacggcggcggagcgcgacgccgcggccctgtccgtcctgcggcaggagctggacgcccggggcgttgccaatgtgacgcccctgtgcgccgatgtgctggcctatacgccgccggtgcccttcgacgccatggtgttctgctttttcggcagcatggaggagatactggccgccgccctccgccaatgccgtggcacggtgctggccgtggtgcgtgacgacgtgtgccaccgcttttccggggcaccccgtgcgccgggctgtcatagcttcgatgccgcctgcggtgtgctggacgcccacggtatcccctatacggcgcagcgtgcagcgctggactttccccagcccttccgtactctggaggatgcccggacatttctgaccctctacggcgggggagcgcctgcggaggacgatctccgcgccaaacttatttccaccggcgatccgaacttcccgtggcagctgcccggcgtccgccgctttggaatgattgcattttcaacagaagaaggagaacacatatgaacaagacaaaacgattgctggcgctggtcctggcgctggtgatgagcctgaccctgtttgcctgcggccggaaggcccaggacgacaagaccgacgacagcacccggacggaggacaccacccgcgtgttcaccgactcctgcggccgcgaggtcaaggtgcccgccgatatccagaaggtcgccgtctccggccctctggcccagatggtggtctttgccatcgccccggacaagatggtgggtgtggccaatgcctgggacgagaccgctgagaattactttgaccagaagtatctggacctgcccctgctgggccagctgtacggcggcaagggcgagctgaacctggagacgctgctggcggccgagcccgacgtggtcatcgatgtgggcgagcccaagagcaccatggcggaggacctggacggcctgcaggaacagaccggaatcccctttgtccacattgacgcctacctggcctccatggacgatacctatgccatgctcagcgacctgctggctatgcccaacgagggtcaggccctggccgactactgccgcaatgcctatgacaccgtcaaggccatcgtggacggcgtggagaaggccgatgtcctgtatatcaccggtgaagagggcctgaacgtcatcgccagggactcctatcacgccgaggtcgtcgatatgctgtgcaataatctggctgtggtggacgagccctcctccaagggtaccggcaacgaggtggacatggagcagatcctgaactgggacccctctatcgtgttcttcgcccccggcagcatttacagcaccgtggccgataacgagaactggcagaccatacctgccatcaaggacggcaagtattacgaggtgcccttcggcccctacaactggatgggcttcccaccaagcgtccagcgcatcctgggtatgcagtggatggccaaggtcctgtaccccgaggctgccgattacgatatgtacgaggtcacccagacctatttccaactgttctaccactgcgacctgaccatcgaccagtacaacgcgctggtggccaattctctccccgctgtgaaggccgccggctgaataaacgaacagggagcggcaccgccgctccctatggcccttgaaaggagacgcatatgaacaacatcttccagaccctgctctaccagcgggaaaagcagaaggacaccgtgctggccaccatcgtgtgggatgacggctctgccccccgcggcgcgggcagccagatgctggtgggggcggagggtctgctctccggcaccatcggcggcggcgcggtggagctgcggtccattcagctggcccgggcgctgctggccggtcagcacgtggacgccctgtatgacttcaagctctcccgtgacggtgagctgggcatggcctgcggcggcgatgtgacggtgctgttcactcccgcccggttgtcggatcgcgtctgggacgcgttggcggcggaggtgctgcgccgcgtgcgtgaccgtgtgcccggttggctggtgctgccgctggacggcgccgcaccccatatcgccgagacggcggagacaggcgagggcgtgttctccctgccgctgccggtgggggagcgcgcggtcattttcggcgcgggacatatcgctcgtgcgctgacgcctctgctgcggacggttggcttccgtcccgtggtggtggatgatcggccgggctttgccacggcggagcattttccccaggcggaccggaccatctgcggcgactttgaccgcatcagcgactatctgacgctgacgccggaggactatgtggtcatcatgaccaacggccatgagcacgactttcaggcggaggtgcaggtgctgcggggcgagacggcctatgtgggcgtcatcggctcccggaagaaaacggccttcgtgaaccagcgcctgcgggaggcgggcattcccgaggagaagatcgcctttgtccacacgccggtgggcacacccatcaaggccgtgacgccggaggagatcgccgtgtccatcgccggtgagatgatctgtgtccgtgccgcgcggcgcgaagcggcaggggaggtacaccatggctgccccatgcactgaccatctgttcctcaccggagagaaaggcgtgggcaagtccacgctggcgcactgcctgctggccgggcatacaccctgcggcttccgcacggtgcgggtaacaggcgtgctggaccggccctctgtgcatctgctgcccgcggcaggcggaacgccctcggcggagaatttgctgttctactgcggcgcttattcctgcgataggttcgacacgctgggcacggcggccctgcgtgaccgtgacggggacgtcctgctgatggacgagctgggcccggcggagtccggtgccaaaaaattctgcgaagcggtgctcgcggctctggacggtgaccttcccgttctgggcgtcctgcaaaaggcggacacggaatttctccgggcggtggcgggtcatccccgggtgcgtctggtgaccgtcaccgtggaaaaccgggacgagctgcgccgtaccatgaccctttaacaaacgctgcgctatggtgtaccacaggtgacaaaaaggtataaataagagcgcaggagagcgccaacaaaagcagcctaaagtaaacaaaagtatcatacaccgtcaaaggacgcgggaagatcccgcgtcttttttcgacttttacttcccataagggacggtttgcggtatactatgggggagaaaacaggggaggtgacgcggtgaagctgcgtatcatcaccggccgcgccggtgcgggaaaaagtaagctggtgctcgaaaccattgcggcacaacggtttgagcgcccgcagattttgctggtaccggagcacgccacccacgaggcggagctggatctctgccgcgcgctgggggataccgccagccgtgacggggaggtgctgagcttccagagccttgccacccgtgtactgtcacaaaccggaggtatatccgatataacgttagataatggtggtaaaatactgataatgcgccgcgccttgcaggaagtttcatcatatttgacggtgttttccaagccatcacagcgcccggcctttctgcgggagctggtggccctggccgatgagttgtacgcctataaaatcgcgccgtcccttctgctgcaacaggttcaggacattccgggcgccgccggagataagctgcgctctacggcgctgctgttcggcgcttatgacgcgcgactccacggcggcgactttgatgcccggtcaaaagtgcagaaactctgcgataaacttccgaattcggactatttgtgcggaaaagatatctatattgatgggttttcctatttcaaccgaacggaggaggatatcattgccgccgcgctgaaacaggccaactctgttacagtgactctgctgggcgatgacagtgacccgcagctcttccgcaacggcatacagcagcgggaacgcctgcgcagactggcaaaggacgccggttgtagttgtgaagtagaaaaccttgtcaggaacagcgacacagcgttttcgcacctggagcgatactttctcggcgcggaaaaagcgtggacgggcagcacgccgtccatcaccttgtaccaggccaataccgcctattctgaggtggaatatgtgtccgcgcagctgcgggcgctggcacaaaagggcgttcgctggcgtgagatggccgtggcggcgcggaacatggaggtatatggcccgttgctggaggccgtgttccgccgggacgatgttcccgcctatatcagccgccggagcgacattttgcagcagccggtcctgacgctgctgctgtccgccgtcgacgcagtgacaggcggcttcgagtatgaggacgtgttccggtgcctgaagaccggcatgacggcactgacggcggcggaatgcgatcttctggaaaactatgtgatccgttgggaaattcggggcaatatgtggctgcgggacgccgactggacggcggatccggatggatacagcggagagataactgattatcgccgggaacagctggccgagataaacgcggtcagaagaaaagtcagaaaactgtttcttaccctgagtgatgggataaaatccaataaaacggtaagaggtaaagctgaagcactttacagatttgcggaggacgccggtacaccggccgtgttggaacagcgggagaaagaattgctggagcaggggcagatgcaggcggcagaggagtatgcccagctgtggcggatattctgtgatgtgctggatcagttcgtggcgcttttgggtgacacggaggtggacggcgatgagtttgcgcggctgctgcggctgacgctgagccagtatgccgtggccaccatacccgctgcactggaccaggtaaaggtaagccccttgacgcgcaatgaccgccatacagtgcggcatcttttcctgctgggcgccaatgaccatgtgctgcccacggtggagaagggcggcggtatattggacgaacaggagcgtgagcttttgcagcagcagggaatcttgctgtccgacgccacgttcgacccgctgagcaatgagctgcagaatatctatgccgccctggcccagccaacggagacactgaccgtgtcctggtgcgccggcgatgagtcgggggcgaagctgctgccgtcctttgtggtagagcgtatccgcaagctgtttccgcaagtggaaatacaacgggaagacggcgcgtaccgctgcggactgcctgcggcagcgctggcactggcgggacagcggcccggcggtgcgctgtggcgttattttgagatgcatggacagggcggtacgctggagaagatggcagcggcccgggctatgggccggggaaggctgtcacccggggcggtacgcagcctgtacggcagtacgctggccatgtccgcctcgcggctggaccaggtgaagagctgtcactttggctatttcatggagtacggcctgcgggccaggcaacggacaaaggcggatttccaggcgccggaggtggggacgtttatccactatctgctggagaatgtcctgcgggaggtggagcagcaggggaagcggccggaaagaccggcgctggcggcgttggtgcggcggtatacggatgagtatgtccggacggtcatcgacggttacggtgagaagagcgcacggttccggtatctgttttcccggctgcgggagacggcgttggtcattgttgagaacgtgctggatgagctggagcattcggatttccggcctgtggcctttgaattgggctttggcggcaaaaacggacagctgcctgccgtcacggtgacggcgggagataccacgctgtccgtcaccggtaaggtggatcgggtggacggctggctgaagaacgggaagctatatctgcgagtagtggactacaaaaccgggaaaaaggcttttgatctggcggatgtgcgctacggcctgggtattcagatgctgctgtatcttttcgcactgcagcggtacggcggggactattttggggcggcggtggagccggcgggagtgctgtacctgccggcgagggacgtcgttaaaaaggcggatcgggccatcgcgccggacaagctggccgcgctgctgcggggcgagctgcgtcggacgggcatggtgctgtccgacccagaggtgctgacagccatggagcacagtgcgctggagtcaccctgctatttgcctattgcagtgaaaaaggacggttcggtcagcggtctggcggccagtgtgttggcggatgcagctcagatgggcaaaatgggtcggtatgtggacgagctgctgcggaaggtagcccgggagctgggcgatggcaatattgacgcagatccatgccgcagggggcctcaggaaagtgcctgcgactggtgtcccttcgcgtcggcctgctggtttgacgagaagcgggacaagccccattatctgcaaaagaccacgccggaagaattctggcagctggtggacgaggaggtgacgcgccgtggctgacatccaactgacggcacagcagcgtggggcagtggaggaccggggcggcagcctgctggtgtccgccgccgccggatccggcaagacgaaggtgctggtagagcgtgtgttcgcctatctaacggaggaacactgccacatagacgatttccttattatcacatttacccgcgccgctgccgccgaactgcggacaaagctggccgcagagctggcgaagcgggtggcacaggacccggagaacagtcacctgcggcagcagatgttccgggtgtatcaggcggacatcaagacggtggacggcttctgtgcagggctgctgcgggagcatatccatctgctggagccggtggatgggcggagtctgacgccggacttccgtatcctggatgagacggaggccggcgtgctgaagcagcgggcactggaggatgcactggaggcgttctatcagcggatcgagcagggggacgaaggctgccgggctttggcggagacgctgggcttcggccgggatgaccgggcgttggcggcgctggtgccggagctgcacggaaaattgcagagccatccctacccggacaagtggttggagaaggctgcggagagctgggcgaacctgccggaacggctgggcgacagcgtgtacggccggacgatcatggaggacacggtgcgccgcgccagttactgggcggggcggctggaacgcgccgtgaaggatatggaagactgcgagagcgtgtataacgcctatggagatcggtttttggaaacggcggcgcagctgcgggaatacgcggccgcggcccgggaaggctgggatgccatgggccgtgtgcagccggccttccggcggatgggcgtggtgaagggggacgaatgcgccggggcgaaggacgcggcgcgggcggtgctggaaaagtgccgtgacgcattgaagaagctgtccgcgccgtatcagacggcggagacggagttgctgggcgatctgcaggtcatcgcgcccgctatgcgggcgctgctggcactgacaggggacttcgacaagcggttccgggcagagaaagtgcggcggaacgctatggatttctctgaccaggaacactacgccgtgcagatgctgtgccgccaggacggaacgcccacggagcttggcgagcaggtgtcccggcggtaccgggagatcatggtggacgagtatcaggacactaatgaagtgcagaactgtatcttccgggcggtatcgcggcagggagagaatatctttgccgtgggcgatgtgaagcagagcatctaccggttccggctggcggaaccggggatattcctggaaaaatacaggacctatgccgatgcggaccacgctgcgccaggtgcgccgcggcggcgggtactgagccggaacttccggtcacgccgggaggtgctggcggctgcgaactttgtgtttgcggcgctgatgtcccgggaaatgggcgagcttgattatacagaggagcagtatcttcactttggggcggaatactatccggaggtgccgcgggagacggagttccactatctggctgtggaggacacaccggagcagcggttcgaccgggcggaggccgaggcgcggtttgtggcaaagcgtattcgctgtatgctggacgaagggttcactgtccggggtgaggacggcaccatgcgtccggcagcaccggaggatatcgtgatactgatgcgctcacccagcgcccggcagacggtattcgccgccgccttggcacgggaggggatcccctgcgacggcggggaaagtgaggatttcttctcggcgatggaggtcgcagtggtattgtcactgctggaggtggtggataacccacggcaggatgtgccgctgatcgcggtgctgcgttcgccactggtaggcatgagcgccgaccggctggcggagatacgggccgtacagcgtgagggggattattacgaggcgctgcggcaggatgagggtgaggacgcgcaggcgttcctgtcgctgctgcatgagctgcggcaggtggcgcgggaactgtccgccgataagctgctgtggtatatctatgaccgctgccgggtgcaggcgatcttcggtgccatggaggacggtacagcccgccaggcgcgtctgagggcactgtatgactatatacggcggcttgtgcagggcggcagaacgagcctgtttgactgtgtgcggcaggtacggcagctgctggaaagcggcgatgcgccggccattaccgcttcaggtgcagcgggcggtgtgcgcttgatgagcgtgcataagtccaaaggcctggagtttccggtggtgtttctggctgacttgaacaggagcttcaaccgacaggacctggatcgaccggtgctggtccatccccagctgggcgttggtgcggagcgcgtggaggtggaacgccggctgcggtacgacaccgtctccaaaacggcgctggcgctgacgctggaacgggaagccaaggcggaggagctgcggatactgtatgtagccatgacccgtgcacaggagaagctcattatggtatgttcgcggaaaaacccggagaagcacctgaaggagctgtgtgcattggcggagctgccggcgccgccggaggcggtggccgcggtaaactgcccgggcgattggctgctgctggcgctgctgagcacatatcaggcaggggtgttccacgattacaccggggtacgtcccgcggtactgtacgacgggccggagggcttggcgctgcggctgcaccgcatcggcggtgaggaggacggcggtgcggcgatgccggcggaggagccggaagcgcaggcaccggatccgcagccggacgaggcggcgctggcgttccggtacagtcacagagcggcgacagtgacgccctccaaggtgacggctacccagctgaaggggcgggccatcgatcaggagatcgccgaggggacactgccggcgcggcggaccgccgcaccggagaagccgcggtttttgcaggaaaagcgcggactgaccggggcagagcgcggcacagccatgcacctggcgatgcagtttctgccgctggatactcctgcggcaccaaaggcagtgacggcttttgcggaaagactgacggcccgacggctgctgacgccggagcaggcggcggcgctggacatcccggcgctggcgcggtttttggcgtcgccgctggcagagaggatacggactgcaccgcaggtgtggcgggagtaccgcttcgcgttgctcaccgatgcgggtatttatgacgtcgcggcagcaggggaggagatactcctgcagggcgtggcagactgcgtgtttgagacgacggcgggtttgacggtggtggatttcaagactgatcgggtgacagcggcagaggcgtcccagcgggcggaggcctatcggccgcagctggacgcttacgccggagcgctgtcgcggatactggaaaagccggtgacggagcgcattctgtatttcttcgcctgcggagaagaaatttctttgtgaaaatagcgaaaaatgcttgcatttgcgggaagagtgtgctattatcacagttgcgtttgcggcgatgccgcggcgacgagtgaaccagaaaggggtgaacaagagcaatgaaggaaggaatccatcccaattatcagcagactactatcaaatgcgcctgcggtaatgtgattgagacaggttctacgaagaaggatattcgcgtggaagtctgctctaagtgtcaccccttcttcaccggcaagcagaagctggtggataccggcggacgcgttgccaagttcaacaagcgtttcggcctggacaagtaaggatacaccactttgcaagacccgtaccaatggtgcgggtcttgttttttattttacttttgcgccgggatggggtataatcgtggaaaatcatcataacgaggacgactatggaacgaaaaaccattgaagaaaataaaaacggtgtgagggattacgcggtgctggtggggctgcggtccccggtacttggtgcagacagcgccgacgaggagagtctggcggagttggcggccttagtggagacggcgggcggtgagtccgtgggtatgatcctgcagagccgggagaaaccagacccccatagcttcatcggcgagggaaaagtggaggaggtcaagcgcatggtggagaacagtgaggccaccatggtgatcttcgacaacgatctgtccccgtcgcaggtgcgggtgctcacggagctgtgcggtgtgcaggtgctggaccgcagcggcctgatcttggatatcttcgcccagcgagcccggacaaaggagggctgcctacaggtagagctggcgcagtatcagtatctgctgccccggctgatcggtatgtggtctcatctggaacggcagggcggcaccggcggctcgcccatcggcacgaagggccccggtgagacgcagctggagacggaccggcggcacatccggcggaagatcgacaagctgaaggaggaactggaggaggtgcggcgcgtccgcgccacccaacgtcagcggcggcggaagaacgagatacccgtggtggccatcgtgggctataccaacgcgggcaagtccacactgctcaatgccatcaccggcgcggacataccggccaacaaccggcttttcgacacgctggacaccaccacgcggctgctgaccgtcagcgatacgctggatgtagtcatctccgacacggtgggatttatccgcaagctgccccatcagttggtcgaggccttcaaggctacgctggaggaattggagtacgccgatctgctgctgcacgtcatcgatgccagcaatccggagtggcaggaacaggcgcggatcgtggatgatctgatccgggagctgggggcggagaatatcccttgcattcgtgtgtacaataagtccgatttggcgtttgccttccagcgggacaaggagggggacgcggtctccgtgtccgccaagaccggcgaggggttggacagactgctctccgccatcgacaaaaagctggacaagggtacgaagcgggtgacgctgcacctgccctatgacaaggccggagcgctggacagcctgtaccgggaggccaaggtggagtccgtggagtacggcgagacggtggacgtggtggcggtgtgtacgccccgaatcatcggccagctgaaggactatatcgaaggttggacggagccgaaggaggagtgggaatgagcgatttccgcgtaccctttggcccgtcagagacggagttcaccgaaaaacgatcccgttttatcggccatctgctgccggtggagacggaggagcaggcgcgggaatttatcgcgcagatgaagaaaaaatactatgatgcgcggcacaactgctggtgttatctcatcggcggtgatacgatgcgctacggtgacgatggcgagcctcagggtacagcgggacagcctatgctgaacgtgtttcagcgggaaaacgtcaccaacgtggtgtgcgtggtcacgcggtacttcggcgggatcttgctgggggccggcgggttgacgcgggcgtattccaaaagcgcccgcgatgcgctggtggcggcaggcgtgtcggagatgggcctgtgggccatagcggacattccgtgcccctacgcgctgttcgagcgtgtgcgtggtgaggtaacggccctgggcggcacggtggacagcgccgattacggcgcggacattcggctgacggtttcgctgccggcagagaacactgcggcgctgcgggaacggctaacggagctgtcagcaggcggcatcgcactgacggtaacggcggaggcataccgtccgggaccaaaggtggaaatataaagacagcgaccccggaggcagggacctccggggtctttcacgttttgcgctggggtatcatacgatggcatgagtacaaaggaggtgccagcatggaggaatatctcatcaccgcccggtccgtgacccaggcgcagcgtatggcgcagctgctggagcgccggggtgtgcgtgccgtggtgggccgtgtgcccatgggcctgaccggcaaggggtgcggctatgtgctgcggctgcggggacagacccgcacggtagcggctctgcggctgctgcgggaggcgggctttgcacccgcgcaggtatttgttcgtcaggatgacgagtatagtgaggtagagttatgatctattttgatgcgggggccacgacgctgcaaaagccggagacggtggcacgggctatgtaccgggcggtggggcagctatcctcgccggggcgggggagttatccggccacgcgggcggcggaggaaacagacctgcaatgccgcacactggcagcaaagctgtttggcgtggctgatccggcgcgagtggtgttcacctcctgcgctacacatgggctgaacattgccgtgcatacgctggtgaagcccggcggacgtgtgatcatttcgggatatgagcacaacgctgttacccggccgctgcacgccatatcgggtgtggagatcacggtagcggatgggcctttgtttgatggggaggagatggtacggcagttcgccgctgcgctggcgtgtccggcggacgcggtgatctgcacacacgtgtccaacgtgtttggcttccgactgccggtagagcgcatcgcggcgctgtgtcgggagaagggtgtgccattcgtgctggatgcgtcgcagtctgcggggatgctgccggtggacatggatgcgctgggcgcggcgtttatcgccatgccggggcataaaggactgtacgggccgcagggcacggggctgctgctgtgcggcgcggagccggagccactgctgcggggcggcacggggtcgcagtcgatcctgcaggagatgccggaggagctgccggaccggctggaggccgggacgcacaatatgccggggattgcaggacttctggagggcctgcggtttgtggagcagcagggcgtgggacgtattgcagggcacgagagacacctgacgcgacatatggcggcacggctgcgggatattcccggtgcggaggtgttctataccccggaggatggggcacagacaggtgtgctgagctttcgcctggacggttgggactgcgaggcgctgggcgaagctcttgcggcgcagggcgcggcggtgcgggcgggactccactgtgcgcctctggcgcaccgcacggcgggaacgctggagacgggcaccgtgcggtgcagcttttcggcctttaacaccaccgcgcaggtggagcactttgcccatattttgcggcaaatcgttcgttaaactgcaaaactgttcacataattttttgttgcattttcccaatattttttatataatgttagtatctatttttatgcccgcaacaggaagggtggtaacgtggataaggtactttcgttattagaaaatattgggaattacttattgctgatacggatatcggatatactggacatcgccattatcgcgtttctggtatacaacctgctccgtatggtcaaaagtacccgcgccgagaatatcctcaagggcgtggtggcgtttctgctggtgctttggctggttgatatattgcagctcaacgccatatcgtacctcatgcggaacctggtgcaggtggggatcctgtccattatcgtcctgttccagccggagatccgccagatactggagaaggtgggcagccggaacatcaaactgctgcgggccttcaacgatcccaagcagcagtcggagctggaggcggccatcgatcagaccgtgatggcctgcaaggagatgtccctgagcaagaccggcgtgctgatcgtctttgagcgcgacatccatctggatgacatggtgcgaagcggtacgacgctggacgccgccgtgtcctccgagctgctgaaaaacatctttttcgtcaaggcgcccatgcacgacggcgcggtcatcatccgccgcggacggatcttgggcgcgggctgcatgctgcctttgagcaaaaacgtgaacctgagccgcgacctgggcatgcggcaccgggccggtatcggcatgagcgagaactccgacgcggtggtggtcatcgtttcggaggaaacgggttccatctccgtggctatcggcggtatgctcaagcggcacctgaagccggagacgctgggcaagctgctgcgtaatgagctgataccgccggaggaggaaacggaggacaagtcccgccgtacactggcagagctgctgggactgaacagaaagggggcggacgaccatgtcggaacggatctctgatacaaacaacgggacggccaacagcgaggcgcgcacgccccgctttaaccgcagcaagaccgtgcagatcatcatctccatcctggtggctctggcgctgtgggtatatgtagatgtggagaaggcgccggagaggacgaagaccatccgggatgtcccggtggagttctccggcgagaacaccacgttggcagacaaaaatctgatgctgctgtccggatatgacaccaccattgatttgacgatacgcggtcctaagcgggaactggtgaagatgagccgggacaatgtgcgggtcattgccagtacatccagcatcgattccgtgggcgtacaccagttggattggaccgtcagcttccctgatggagtggtacgcacgaatgtcagcgtggagaaggccagcctgagccagatcacggtgacggtgggcgagttgtatacgaaggaagtgccggtggagtgtcaggtcatcggcgaggtggctgagggatattttaccggcgatgtagtgctggatcccgaggtgctgacgctgcgcgcccaacgggacgatctgctgaatgtcagctgcgccaagctgacggtggatatcagcggcgcgacccgatcggtggtgcagacggtggacgtacagctgtacgactacgacggcaatctggtggagaacagcaacatacgcaccagcgccagcctgatacaggccaaggtgccggtgctgaccaccaaggaggtggccctggccatagagttcgagggcgtgcccggtgcggcggcagacagcatcgtctgtgatatcgcgcccaagacggtgcggctgaacggagaggccgacgtgttggcgtctattgacaagctcgtgcttgccacgctgcatgtggacgatctggggctgcaccagcagaatagctatgtggtcacgccgccggacggcacctggctggtcaacggcaacgaggtggccacggcggacatcaccctggacggtatcagcgagacgacgctgacggtgacggatctgtccttcaccgatctgccagcggggctgtatgccgtcgtgccagagggcggattgacggtgcggctgtggggactcagcgaggagatcgaggccattaccgccgagaacctgcgggccacggcggacatgagcaccgtgaccggacaggggagcttcaccgtgccggtgaccgtgacggtcagcgggttcagcgatgtgacggtgcgcggcacctatgagctgacgctgaccattaccgacacgccgccgcagacggagccggcggtacctgccggcggagaggaccagacggtccccgaggcgccggagacatgagtattcccgagaggtgagataatgacacagatcgcaacggttgaaaagctattgcccggcgggtatgcggagatatccgtaccgcggaagaccgcctgcggccacgactgcgaggaatgtgccggctgcggcatgaccggcgcggctatcaaggcccgtgccaagaacgatcccaacgcgcagccgggagaaaaggtcgtggtggaaagcagcacgaaaaagctgctgggtgtggtggcgctggtgtatgtgctgcctgtggtcgggttcctgctggggtatttcctcagcgaagggctgctcgagggctggcggtacgggatcgccgtggctgcggcggtgctggcatttttgcccagcgtggcctatgaccgctacgcacggcggaaagagctgctgacctacaccatattacgggtgttctgagagatgttcggctatgtgcggccttcggatgaccggctgacgccggcggaccgtgagacgttccgcgccgcctactgcgggctgtgccacgcgctgggtgcgcggtacggcttggtggggcggatgatcctgaactatgatctgacttttttggcgatggtgctgtcggacggagcaggggaaatgtgcgccaagcgctgcgcggtgcatccgatgcggagacgctgctgcgttgcgggcgatccggcactggacgcggcggcggacatgagcgtgatactgacctactggcagctgcgggacggcgtggccgaccacggcttctggtgtgggctgaagtaccgcattgcgtcggtgctgttgcgtccggcgtaccgaaaggcacgggaacggcggcttcagtttgacgcggggaccaaggcgcatctgtcggagctggcggcgctggaacgggagagatgttcctccctggatgcgccggcggacgcctttgcacagctgctggcgttggcggcggaggaggtcaacgatccggtgcggcggcgggtgacagcgcagctgctgtaccatctgggccgatgggtctatctggtagacgcggcggacgacctgcgggcggatataaaaagcggcgggtacaacccactggccctgcgctttacgccgaaggacggcgcgctggcaccggccgacagtgaagtgctggccctgacgctggatggttctgtccgggccatggcggcggcctttgagctgctgccggagacaaagtacacaccggtcctgcgtgctgcggtgtacgaaggactgtatgccgttggggcggccgtgctgcacggtacgttccgtaagcggcagagacgagaagaacctatacgaaaggcggacacggactatgcgtgatccctatcaagtgttgggggtgcccagcaccgccacagacgaagaggtgaagaaggcttaccgcgacctggcgcggaagtatcacccggacaattatcacgacaacccgctggctgatctggcgcaggagcgcatgaaggagatcaacgaggcctatgaggcggtgcagtcccagcggaaggcccagcgcagcggcgggtattctgcctccggtgcgggctacggcaccggatacggcgggtatcagtcggcatatcaggggccctatcaggggtcctatcaggggtcctatcagggcagcagccgctatcagcgggtgcgtatggccatcagcagcggcgatctgaacctggcggaggagctgctgaacgcccagactaaccacgacgccgagtggaatttcctcaagggtgcgatctgttatcgccggggctggctggacgaggcgcggcggtattatcagactgccgttactatggcgccggacaacccggagtaccagcgggcgctggatattctggagggacgtggtgcggcctaccgacccgatggctatggcagtgtgaccaccggcacctgcggaaacagcgactgtctgcgcctgtgcggcgccacgctgtgctgcaacgcgctgggcgtgcccgtttgcttctgctgaatttctacacaacaggggagggtttccctgttctactaaaatgaaggagttgatcccgtggtcaagagtatgaccggttacggccgcgcccgcgagatgcgaagcggcagagatatcaccgtggaggtgcggtccgtcaacaaccgctatctggactgcactgtgaagctgccccgcgcctatatttttgcggaggacgccatcaagacacgcgtacagaaagcgatctcccgcggcaaggtggatgtgttcgtcaccatcgacacctctgcggcggatgtggcggtggtgcaggtgaacgaagggctggcgaaagggtactatgacgcgctgatgcatctgaagaacagctttgcgctgtccggcgatgtgacgccggaggtgctggccaggttcccagatgtactgacggtcaccaaggcggaggatgatgtggaggctatcgccgccgatatctgcgccgtgctggatgatgcgctggcggcctataacgccatgcgtgccgtggagggtgaaaagctggcgctggatgtgtcctcccgggtggataccatcgaggagaccgtgagcaaggtggaggcgcagtcgccccagacggtagcggcctatcgccagcggctggaagccaagatgcaggaggtactgcagtccaccaccatcgacgagagtcgtatccttaccgaggcggccatttttgcggataaggtggctgtggatgaagaaacggtgcgcctgcggagccatatcgcccagttgcgggacatgctgcagagcggcgagcccgtgggccgaaagctggatttcctgatccaggaggtcaaccgcgagtgcaacaccatcggctccaagtgcaacgatctgactgtggcacgggatgtggtgaacatgaaggccgaggtagagaagatccgcgagcaggtacagaatatggagtaaggaggccggtatgcagtttatcaacatcggcttcggcaacctggtgtccgtccagcggctcatcgccgtggtcagcccggactctgccccggtaaagcgcctggtgcaggaatcccgtgaccgtgggatgcttattgatgctacctacggccgcaagacggcctcggtgctcattatggacagcgaccatgtggtgctttctgccctggcggcggagcgtctggcgccgcgcctgggattgtcggtggaagaattgacagaggaggatgaatgacccttgcataagataggaaagacctttattgtctccgggccctccggtgtgggtaaaagcaccgtgctgcacgccctgttccagggccgtgatgacctgtatttctccgtatccgccactacccgcgcgccccgcgagggtgagcaggacggcgtggattatcacttcatccaggcggatgccttccgcgatatgatcgccgccgatgcctttctggagtatgccgagtatgtgggcaacttctatggtacgcccaagatgtacgtggacgatgccatggcccggggcaaggacgtgatattggatatcgagcgccagggcgccgtgcaggtgtgtgccaagcggccggagacggtgcgtattttcatcgccccacccagctgggatgaactggagcgccgcctgactgccagggggaccgatacgccggagaaaatacagaagcgtctgatccgcgcccaggtggaactggagatggccggcgactatgactattttgtggtcaacgatacggtagagaatgccgtgaatgagctgcgggccattatgtgcgccgagcactgtaaaccagctgagcgtatgtgcgccatcctcagcgaaaagtaagtgtgtgaaccgacgcggcctgtccgcgtatttgggccgccccgcctgggcgcagccatacaaaacgaaaggaattgatcgttatgtctatgctttatcccgctatgaacaagctgaccgagtacatccccaatcgctacatgatggtgaacgtggtggcacgccgcgcccgtcagatcgccgccgaggccgaggtcaccggcgagcctctgccggagaaacccgtgacgatggccatcggcgaggtggccgagggcaagtacgtcagcgaccccgttatcgaggaagacgaggcctgaggtggcggtgatcgccaaggtggccgtacaggcggctacctacgctatcgacaaggcctatgattacctgctgccggaggaagtcggcggacaggcaggctgccgggtgctggtgcccttcggccgcggcaaccgactcacagaggcgatgatcctctccctgcatcaggcggtgccggacaagccgctgaaggcggtccgatccctgctggatgaagagccggtcatcacggaaagggagctgcggctggcgctgtggatgacacgccggtacttctgcacattttatgacgcgctgcgtaccgtgttgcctgccgccgtatggtaccattaccgggagacttggtccctggcacagccgccgctggtgcccacacgacaggaggcagcggtatgccgccttttgcaggatggcccgctgaccacggataagctgcgtcaggcgctgggcgacgatgttgagccgctgctgcgccgcatggccaaatcgggtgcactgcactgcaaaaaggagcagagccgcaaggtacgcgacaaggtggtactgttcgcccgtctcgctgttcctgctgaagaggcgttggctctggccggtaagtcccagcggcggcgtgaggcggtgacattccttgcccagaacggcgagacggcactgcacgatgtgacgtatttcaccggcgtatcccgccagacactgaacgctctggagaagctggggacggtggcgtaccgggagcaagaggaataccgaatatctgaaaaacaatacactgtaaaggcggatagcttgacgttgaattcccaacagcagcgcgtctgtgacacgctgctggcccaggtgcggacggagacgcccggcgtcacgctgttgtgcggcgtaaccggcagcggcaagacggtggtgtatatccggctggcgcaggaactgctgaaaataggcagatctgtgatgatcctggtgccggagatcgccctgacgccccagatgatggcgcggttcaccgcgtatttcggccacgaggtggcgctgctgcacagcggtttgcggatgacggaacgctatgatcagttcaagcggctgcggcggggcgaggcccatatcgtgctgggtacccggtcggcggtgtttgcaccgctggaaaatttgggcctcatcatcatggatgaggagcaggaggggtcctatcaatcggaaaacgccccttgttatcatgcacgggatgtggcaaaataccgctgcgccgccgagggtgcgcggctgctgctgggctctgccacgcccacggtggagacgttttaccacgcgcagcagggtgagtacgatctgctggagttgacggagcgttacaaccgccgcgctctgcccgaggtccgcatcgccgatctgcggcaggagctgcgtgccggaaacagcaccgttatcagccgcccactgcaggaggaactggcaaaaaacatcgctgcgggggagcagagcatcctattcctgaaccgcaggggcagcagccgacagctgctgtgtccccagtgcggctatgtgccggagtgcccgcggtgcagtgtatacctgacataccacagcgccaatgaccggctgatgtgccactactgcggttattcacacgctgcgccgacggtgtgcccggagtgcggcggcacactgaagcatatcggctttggtacccagcgggtagaggaggagctgcatgagctgttcccgggagtcgaggtgctgcggatggatgcggacaccgtatccgtgggacatgaggcactgctgaaggaatttgaggagaggcagatccccattctgctgggcacccagatggtggccaaggggctggattttgccaatgtgacgctggtgggtgtgctcagcgccgacctgtccctatatgtggatcactaccgggcggcggagaggaccttcaatctgttgacacaggtggttggccgtgcgggtcgaggcgacaaggccgggcgggctgtgatacagacctacacaccggagaatgatgtgatacaggcggcggccgcccaggactatcagaggttttacgacgccgagatcgcgctgcgccgcctgcggcaggacccgccctttgcggatcagttcaccgttacggtgacgggaccggaggaggcgtcggtacgtcactccatcgagctgctgcggcaggggatcggaaatgcggcggagaagccgccctacgacacgctggggatacaggtcatcgggcctgcgcctgcgccggtggtgaaggtcaacggcgtataccgttaccgcctgctggtgctggggcagaatatcgcgccagtgcgggagctgctggcgggtttcatgcgggcttttgtccaacggccggaaaaccggcgactgcatatctatacggattgtgacaaaatggattagatccaggaaatatgaggtaagattatggctttacgaaagatcgcgttggagggcgaggcgtgcctgagcaaggtgtgccgcccggttacagattttaacagccggctgcatacgctgctggacgacctggcagatacactggccgactccggcggcgtgggcctggccgcgccccaggtgggcgtactgcgccgggtgtgcgtggtgctggacgaggaggatcagctgatcgagctggtgaacccggagatcatctacaccgaaggggagcagactggcctggagggctgcttgagcgttcccgggaaatacggcgtggtaacgcggcctgaggtggtgcgtgtccgtgcccaggaccgggacggtcagtggttcgaggtcgaagacgagggcctgacggcccggtgcttctgccatgagatcgagcacctggatggtcatctgttcgtggagcataccgaccggctcatggagggcgaggagctgcagaagtggctggaggcgcacgccgacgagtacgagatcgaggaagaagaggacaagtaatgcgtattctgtttatgggaacgccggattttgccgtggcgtccctcaaacggctggtggccgacggacacgacatctgcggcgtgttcacccagccggacaagccgaagaaccgcggcatgaagctgatcgcgccgccggtgaaggaatatgctctgacgcagggactgcacgtataccagccgttgaaaatgaaggacggtacggcgttggagctggtgcggtcccttgctcccgagctgatcgtggtggcagcctacggccgtatcctgccggaggacatcctgaacacgccaaagtacggtgccatcaacgtacactcctccatcctgccgaagtaccggggcgcggcgcccatcaactgggcgattctcaacggcgacgctgtgacaggcgtgtccattatgtatatggcgccggagctggatgcgggagatgtgatactgtgccgcgagacggccatcgatccggacgaggacgcggtggcgctgacggcgcggctggcggagcttggcgcggaagcgctgcatgaggccatcgggcagatcgaacgcggcaccgttacccggacggcgcaggatcacgcggcgcacacctacgcgcccatgctggataaaagcctctcgccgatggatttctcccggtcggcgcagcagctgcacgatcaggtgcggggcctggtgccctggcccagtgcgtccatggtgctggcaggcaagccggtcaaggtccaccgcaccgcggtaggcggagagacctccgccccggcgggcagcgtggtggaggcggacaaaaacggcctggccattgcctgcggcgacggcaggttgctgcgtgttcttgaattgcagggcgagggcggcaagcgcatggcagcggcggattatctgcggggccatccggtcccgctgggcctgtgacgccccgtgacgcgcgggacgcggcgctggaggcgctgctgcagatggagcgccggggcgcgtggtctgacggcagcctgaagcgtatcgcggcccagtccgggctggaggcccgggacgcggcgctgtgtacccggatgacctacggcgtggtgcagaaccggacactgctggactactatatcgaccattggtgtacgcagaaggccgcccggctggaaccggtggtggcctgcctgctgcgtttgggtatatatcagatactgttcatggacaaggtgcccgaccgggctgctgttcatgagacggtggagctgacaaaacgccggggcaagacccgtgccgcgggcatgatcaatgcggtgctgcggaaatgtgcgtcaagcaaaaacactttaccgccattgccgcagaatagttttatttccaaagcagcggtgcagtacagccatcccaggtggttggtggagcgcttgacggctttggccggcgagcaggaggccgaggcgttcctgcggttggataacgagcctgttcccacggtgatacaagccaatccgctgaagaccacgccggcggagctggaaaatgagctgcgatcggacggtgtccgtctgacgccccatccctggctggagggctgctttgaagtcaccggtaccggtgatttggagcgtctgtccgcctttgcgtcgggacgctgcacggtgcaggatgccgcggcgcgtttggcggccattgccgccggaccgaagcccggcgaccgggtgctggatgtgtgcgccgcccctggcggcaaatcctttgccatggccatgcagatggagaaccggggcgatatcctctcctgtgacattcacccccacaagctgaagctcatcgaaaacggtgcggcacggctggggaccactatcatccgcacagcgctggccgatgggcgggagcgtcacgccggctgggtggagcaggccgatgtggttctggccgatgtgccgtgctccggccttggcatcatccgcaagaaaccggatatccgctggaaggatccggcgcagctggcacagctgcccgccgtccagctgtcgatattgaacaacgtgtccgcctacgtccgtcccggcggcgtgttggtgtatgccacctgcaccgtcctgccggaggaaaacggcggcgtggtgtcggcctttttggacgtacacccggactttgcgaaagaggaatttaccctgcccggtatcggaagctgtcccggtgatgtgacactgtggccccagcggaccggcaccgatggattttacatctgccgtatgcgccgcaggggataacgtcaaggagcgaattgcatgaccgacatcaaatccatgaccgagcgtcagctggccgacttttttaagaatatgggacagccggctttccgtgccaagcaggtattcacctggctgcaccgtggcgtgcgctcctttgacgagatgaccgacttgtccaagcctctgcgtgcccagctggccgagacgtgcttcattacagcgccgaccgtggcccggaagcagacctcaaagctggacgggaccgttaaatatttgtgggagttggccgacggcaactgcatcgagacagtcctcatgcaataccaccacggcaacaccgtgtgtatctcctctcaggtgggctgccgcatgggctgcgccttttgcgccagcaccatcgccggcaaggtccgggacctgcggccctctgagctgctggaccaggtgctgtttacccagctggacagcggcctgcctgtctccaacatcgtgctcatgggtatcggcgagccgttggacaacatggacaatgtgctgcgctttttggagctggtcaacagccctcatgggatgaacatcggtatgcggcatatcagcctgtccacctgcggcgtagtgccggggatcgacgcgctggcggatcggcagcttcaattaacgctgtctgtatcccttcacgcaccggacagcgagacccgcagccgcattatgccggtgaaccgggcgtatgatgtagagacgctgtttgccgcctgccacagatacttccaaaagaccggacggcgcatcagctttgagtatgccatgatcgacggcgtcaacgaccacgactggcaggcggagctgatcgcgaaaaagctgaagggtatgccgggccacgtgaacctgatacccctgaacgacgtggtggagagcccgtataagcccagcagacgcatcggcgcattccagcagaagttggagagtttgggcgttaccgccacggtccgcagaagcctgggcggcgatatcgacgcctcctgcggccagctgcggcggaaggaaatgcaggaacgcggccaactgtgagacatggactctttacggaataaaggatgtgagcgactatgaaaatgtgggggatcaccaataccgggttggtgcggagcgagaatcaggacgcctacgccgtgttcgaggccggcgcattccatgcggccgtggtgtgcgacggtatgggcggcaccaacggcggacaggtggccagcgccatcgccgtagcccggttcgaaaaggagctgcgcgacagcctgcgggacgatatggacatcccgcagctgcggcaggcaatgctcagcgctatcgcctgcgccaatgacgccatccggcaggaggcggcgcggaacgcagagtaccagcacatgggtaccacgctggtgtgcgccgtgacccggtccgacatggccgtcatcggcaacattggcgacagccgtgcctatcacatcacgccggaggggattttccagatatcccgtgaccactcggtggtggagaatatggtggccaagggtgacctgacgccgctggaggcccgaacgcaccccaaccgcaatctcatcacacgggcacttggcccggatatccacgccaaggcggacgctttcgaactgccctggcacaaggacgagttcctgctgctctgttccgacggactggtgaacaccgtgtcggatcaggagatgctgtttgaggtcctccacgacggggacgtaaatgaatgtcttgaccatttgctgcaaatatcgcttcagcggggcgcgccggacaacatcacggcggtgctgctgctgaacggggaagggagatgaccacatggatcagtatatcggaaaaatgctggacgatcgctacgaaatactggagctgatcggctccggcggtatggccaatgtctataaggcccggtgccaccggctgaatcgccttgtggccataaagatactgaaaagcgacctggcggacaacgcggatttccgccgccggttccacgatgagtcccaggcggtagcgcagctgagccacgccaacatcgtgtcggtgtatgacgtatccaccaatccggaccgggaatacatcgtcatggagctgatcgatggcatcacgctgaagcagtatatggagcgccgtggccgcatggactggcgggagtcgctgcatttcatcacccagatcatgcgtggcctgagccacgcccacagccgcggcatcatccaccgtgatatcaagccccagaacatcatggtcctgcgggacggcagcgtgaaggtggctgatttcggcattgcctgccttgccaaccaggggcagacactgacccaggaggcgcttggctcagtgcactacatctcgccggagcaggcccggggcgaccgtatcgacgcgcgctcggatatctattccgccggtgttgtgctgtatgagatgctcaccggacgcctgccctttgagggcgacagcgccgtatccgtggccatccagcacctgagctccgtgcctctggcgccccgggatatcgatcccagtatccccgagccgctggagctgatctgcatgaaggctatgaacagcgaccccaacaagcgctacgcctcggcggacgccatgatcgaggatctggagaagttccgccgggacccctctgtggatatggactatatccggcaggagctgactgcccctgccgcggataccgagcctaccatgcccctgcccacggcgcaggtggcctccgccgtaaaaaagcacaccggcgagctgcgccgggagcgcgaggcggaagaggagccgccccgccgggataagaagtctattgctatcatcgccgggatctttgccgcggcggtgctgctggttgtgctgctgttcaagctgatactgggcgatttcggccctgccggcagcaacaagagctaccctgtgcccgatatccgcggcaagactgtggaggaggcccaggagatggagggcgtaaaggatatcttcctgatcgaggtacagggtacccgcactacggaggaataccagccggggcagatcgtcgagcaggatcccgctgccggccgcacccgaaagagcaatctggtcattcaggtctatgtggccgctgagccggagaaggtgccgatgaaggacctggtgggcatggagtaccggcaggcgcgcgtgcttctgaccgatatgggtctggatctgaagatcaccacggaaaccgtgtcctccgacaaatacggcgcggacgccgtgatcgagacagtccctgccgccgacgaaccgctggtggccggacagacggtgatcctgcgggtcagcaccgggccggaaacggtgacggtgcctaccttcaccggtcaggatatcgccaacgcagtgcagaatgctcaggacctgggccttaccgtgggcgagatcacctatgacacattcagctttgcgccccagggtcaggtgatcgagcagagcatcaagcccaccagcgaggttcccggcggtacaaaaatcagctttaccgtcagcgggcagaagaacagcgacgacgccacagcggcccgggtggtggagtttaccatgcccagcgatatggagggtatgatcaaggtggagttcgagcaggacagcgtgactctggacagccagtacatcaacgcctccatggggacggtgacatataccttcaccggcaagactgggaccagttctaacgtctgtgccgtctttaccagcatgaacaccggggccaccaaggtctccgctattcaggagatacgcttttgagccggggccgcatcgagaaggcactcagcggtttttactatgtaaataccggagccgagacgctgcaatgccgcgcccgtggaaagttccgccgggagggcatgagcccgctggtgggcgactgggtccaggtccgtgacctgggcgggggcgagggctttgtggaggctgtggagccgcgccgcaatgtgttttcccgtcccgccgccgccaatatcgatcagctggtcatcctggcctccgccgccatccctgtgacggagccgtatctcattgaccgcattgccgccatcgccgccctgaagggctgtcaggtgctgctgtgtctgaacaagtgcgatctgaacacggcggacgagctgtatgacatctatagtcattccgccctgccggtgctgcgtatcagcgccgagacaggggagggactggagacgcttcgcgccgccatcgccggaaagctgaatgcctttaccgggaactccggcgtggggaagtccagcgtgctgaatcggctgctgccggaattgcatttgccggtgggcgaggtcagcaaggcccttggccgcggccgccataccacgcgccatgtggagctgtttgctctgggcggcggcacctatgtgatcgacacaccgggtttttcctcctttgatacagaggaaatggacctggaactgaaggcgcgcctgccggagacgttcccagaatttgcgccctatgtggaccagtgccgctttaccggctgcacccacacaaaggaaaagggctgccgtgtgctgcaggctgtgcaggacggcgatatccctgccagccgccacaggagctacctgcggctctatgatgaactgaaggacctgcgggcctggcagaagaagtgaaaaagcggagtgcgatgcactccgctttttgcgtttcatatactggagcagggggagggatatacggtgcgaagatggggcggctgctgctggttgggcatttgtgcgctgggattgggactgggtatcctgatcgcggcggtgttcccggtgggctgcttaatgttcctggtgtcgtttttgctgatcgcctgcggcatcgcgtgtttgagggacaggaggtgaaggcatgaggatcatcgtctggcgggcgccccgtgggatgcggggactgctgcgccggctgttcggcgtggcggcataaccgccggagttcacacatagaatggtcacaaaccataggaatgtgagggctggaacgatggaatgtggcttgcaatggaaagatatcacctgctgggatgaggtgccccggctgacgctgacccatgaggagacgctggaggcagccatccccgattactgcccggacatggggcgtgtggtggaggcctcgggcacactgtgtctgcggtccatcaccgcccgcagcggcaatctggaactgaagggtactgttcgggtcacggtgctgtatacatcagaggagagcgtgggactgcggagcctgacccaggcggtgccctttgtctgcacggcggagaaccgtcccctggcggtctgccaggtgctgtgggccgccggaaggctactgctgtgcgaggcccaggcactgacgccccgccgtttgtccctgcgtctgatgccggagtggacggtctgcggctatacctgcaccaccgtacagctgtgctgcggcgtggaggaggaccccgccctgcggctgcgccgccgggagcatgagctgtacatgaccgccgccatggcggagcgtgagtgtgccgtcgccggtgaggtcacggtaccggccggccagccggcaccggaggacctgctcatctgccgcctgtacccccaggtcgcctcctgccagctggtgggcgccaagctgctggtaaagggcgaactgaccctctgtgccctgtatcgctgccagcagcagaagctgcatacatacaccgccgctgtgcccttctcccagatcgtggacagcccggccggcggtgaggagggggatgttgccgcccgggtgcagctgatctgtggcgaggcgcgtctgctgcggaccgaggagagcagcggattctccgtctcggcggagcttcggctgctgctgcgtatcacgcgtaaggagacggtatcctgcgttacggatctgtacagcacccactgcggcaccaagctggaaacgacagaacggtccctgcccctggcgccggagcgccccgtgcggcaggaggcggtccagcatctggatttcggccgtcagcggcccttcgtgttcgttacggataccgcctgcgcgccctccgccggagaagacggtacgccctgcgccgacgtgcgtatgcgtctgctgtatctggacgaggaggatgccccggccgtcaccgaaaaaatggcgcagctgccgctgggagagggagaggtctgtaccctgtgcggcgcaccggaggtagccttcaccggcagcggttgtgatctgcggcaggcggtggcggtatcgcccgccgccgcgccccgtgaaacgctgtcaaccgtcagtgcggtgcagtgtctgcctgagcaggaaaatgcccgccggccatctctggtcatgcgccgtctggcgccgggagagactctgtgggatgcggcaaagcagtaccgcaccgacgaggagctgattcgcgcggtgaaccagttggaggagggaacggtaccggataaaatgctgctgatcccccgcgttcggtaaattttcgttgactttccgccgccgtttgggtagaattgatcctgcgagtacgctggatagtcgcgggggcagggcgaaagcccgtccatgaggaaagtccgggctccacagggcaaggatagcgggtaacgcccgccgaaggcgacttcaggaaaagtgcaacagagatataccgcccgtcggctttgcgtcgatgaggtaagggtggaaaggcgaggtaagagctcacccgacggcgtgtgaaagcgaccgtcgctgtaaactctatccggagcaacaccggtatgggagcataggccggcccggctgctcccgaggtggcttgagcgtaccggcgacggcacgcgtagatagatgactatcaaaacagaacccggcttataggcatactcgcacgatatgaaagcccccacgcgaaggcgtgggggctttctttccatctgttaaatttcggaatagcgggacaggaactgcttagtgcgctcctgccgtgggtggtcgatgacctcccgcgccgcgccctgctccacaatcacgccgccatccatgaagatgacctgatccgccacgtctctggcaaacgccatctcgtgggtgacgatgatcatggtggtgtgctgctgggcgagaccgcgtatcacccggagcacctcgccggtcagctccgggtcgagggcggaggtcggctcgtcgaagcagagaatgtcgggcttcatcgccagtgcgcgggcaatcgccacgcgctgctgctgcccgccggacagctggtgggggtagttgctcatgcggtcagccagaccgatgtccgccaaaagccgtttgccttcggcaaggatgtcgtcgtgactctctccggttttctccgacttagccatcaactcacgcgccagcgtcacgttttccaaggcggtgtactggggaaagaggttaaagctctggaataccatgccgaagtggagacgctttttacggatctcgctctcggaaagggtggcggggtcgtcggcgtcgaagagcttttcaccgcgtacggtgatcacgcccttatccggcgtttccagaaaattcaggcagcgcagcaacgtggttttgccgctgccggaggagccgatgatggacagagcctgcccctcctccagagagaagctgatgtcctccagcacgtgggtgtcgccaaagtgcttttcgatgtgctgtacgtctaagatcgccatgtgcggcacctccttagcggaaataactgagcttgcgctcggcgtagttgaacagcagtgtcagaacgcctaccagagccagatagaacacagccgtgtagaacagcggccatgtgataccggaggacttcatgtaggactcgccggtcatgatcagctccatgatggcgatggtcttggcgagggaggtgtccttcaccagcgtgatgacctcattggacatggggggcaggatgcgcttgaccatttgcaacagcgtgatcttaaaaaaaatctggcttttcgtcatgcccagcacctgtcccgcctcctgctgccccacggggacgctctcgatgccgccccggtagatcacggcgaagtagcaggcatagttgatgacgaaggcgatgacgcacgccgccatacgggggtcgctgaagctcgcccagatattgttgttgaaccatttgccgggaccgtagaagatgatgataagctggagcatcagcggcgtgccacggatgatccagacaatcacgttaaaaagccagcttaccggcttgcagcggctgcgtagggcaaaggcgatcaaaagccccagaggaagggagaacagcaacgtcagaaagaacagcttcagcagctgtcccatgccgcctaacagggagagggtgacagtccagaacatgaaaaaactccttcgtggttacttcgcggggaggggaaaccctttacgaatattccgcccaaaggcagaggacgctgtacgccctctgccatgggtaagtatcatatcacaaatcagacggtttggcaactcacttggtaatgaccacctgtgcgttgttgcagtaagcgttgctgcactccatggcgttcatcacggcgtcggtcaaagtcatgccgttccacacgcagtcgatggtcttgccgtccagctcctcgatcttggtgtcccagttgatgacctggaactcaacctccacgcccagcttctcggcgaccagcttcgccatgtccgcatcgaagccgatccactgcccgttggcgtcctgatagtccataggctcaaactcggtgataccgacgatcagcttgcccttgtccttgatgtactgtacatcgctgtcactctcggaggcggtgtactcacagggggactgctccaccagagactcctgcacaccgtaggtagtggcgacctcctgcatcttgccgctggcgtaggtctccgccagaacgctattgatgaaggacgccagatcgctgcccttgcggcagccgatgccgtacagctcagaggtcagcttctgatccgtgaccttcagattggggtagctggtgttctcgcccaccatggcacctgccatcagcaggtcaatgatcgcggcgtcggcggtgccggcgtccgcctccatcagagcctttgcctgagtgtccacggacacggtcttaaagcccttctcggcggcggcagcctcaccggcggagccggcttccactgcgtaggtcagctccttggtgtcggaattggcgtcgtccttggtgtcgttcttctgcccgcaggccgccagactcagagtcatgaccaacgccagcagcatggcaacaaatttcttcatgggatgttcctccgttttctgcggctctgttcaccgcttgatttactacgctatcatattagcactttagaacgatagtgtaaagaagtaaaacgtccgacatttacacaaattttccttccggatttgtgcaatatgacagctgtgctctgccacaggggattttccgggtttccgaaggaaaaagctaattgaaaatcccgccgattgcggtataatatattagttaaataaaaaatttggggagggagacacctatgaccctgcgggaatatgtggactctattagaaataagcttgtggcggtcatcggcatcggcgtcagcaacacgccgctgctgaagctgcttgcggcggaagggctgcgcgttgccgcctgcgataagcgtacccgcgagcagatggggcagcaggccgaagacctggagcgtcttggctgcgagctgcacctgggtccggattatttgaaggatctggaggcggacgtgatcttccgcacaccggggctgcgcccggatgtgccggagatatcggcctgtgttcaaaaaggcgccgttttgaccagtgaaatggaggttttcttccggatctgcccgtgtccgatcatcgctgtcaccggctctgacggaaagacgacgaccaccaccatcattgccgagctgctgaaaaaggccggaaagcgtgtgtgggtgggcggcaatatcggccacccgctgctgtgcgaggcggacggaatgctgagcacggattttgcggtgttggagctgtccagcttccagctgatgaccatgacgcagagtccgcacattgcggtcgtcaccaatctggcgcccaaccatctggatgtgcaccgggacatggcggagtatgtggcggccaaggagaatatttttacccatcagagtcgggaggacattgccatttttaatgcggataatgccatcacagcagagcagtccacccgcgcgcccggccgcgcccgcctcttcagcaggcagggtgaggttgccgacggcgtgttcctgcggggcgaggacgttgtctgccgcagcggagggcacgagcgggtcgttatgaccgccggggacatcaaaattcccggcgtacacaacgtggagaactacatggcggccatcgccgccgtggacggcctggtgccggaccaggtcatccggacctttgcccgggaattcggcggtgtggagcaccgcatcgagctggtacgaacctataagggcgtgcggtattataatgactccattgcctccagtccctcccgtgccatcgcggggctgcggtcgttcagcgagaaggtaatcatgatcgccggcggctatgacaaacacattccctttgatgtgctggggccggagatcgtggcgcatgtgaagttgctggtgctctgcggtgccacagcggataaaatacgcgccgccgtggagaatgcgtcggggtaccggcccggccacccggagatcatcgacgccgcgcctctggcagcggcggtgcaggccgcccgcgatcgggcacagcccggtgatgtggtgacgctgtcgccggcctgtgcatcttttgaccaattcaagaactttgccgagcgcggcgactttttcaaagccatcgtgaacggctgggaggaatgaggaaaagccgtggtgtcatagacttccgtagtaagcgcgtcatacagcgcgtctatgggaggtgacggcatgggccggctgcggtatatacgattgacccggcggcagcgggtgcgtgtgtggctggcgatcatcctgctggcgctgacggcgctgctggcggcgatcctgctgcacctgcggcccatgctggaaaatctggcaacagcccggtgcgccaatactgtcagccgcatcgtggtggcggcggtgaacgacgccgtggaaaacggctggatggaatacgaccggctggtaaagttcgacaaggacagcgacggccgcgtgacggcgctgagcagcaatatggcggagttcaaccgcctgcagaccgcggtggcggatgacgtactggcgcggctgagtcaggtatccgccagtgaactggcggtgccgctgggcacactgaccggttcgccgttgctggcgggccgagggccgaagctgacggtaaaaatggagaccatcggcacggctaccgccaaattccgggataaattcacggcggcgggcatcaaccagacaaagcaccagatcctgctggatgtagacgtacgcgtgagtatcctgctgccggggatcaccacctacacaaaagtgagcaacgagatatccgtggcggagacggtgatcgtgggcggcgtgccccagacgtacacctatttcagcaccacggaggataagatcgaggattacgccgacgagtacattatgaacaatggatgagggcttggatatggactatcgcaaggagatacaggagctgcgccgcacgctgacggagaacggatacctctactacgtgctggatgcgcccaccatgtcagattatgaatatgaccatctgctgcggcggctggaggacttggaggcagcgcatccggaggagatcacgccggattctcccacccagcgggtgggcggacagacgctgacggagtttcagcaggtgacccacgccgtgccgctggaaagcctgcaggatgtgttcgacgacgaggaggtctgccgcttcctggagaagatacccctggagcaccccgcctacagcgtggaaccgaaggtggacggcctctccgtggctctggaataccgtgacggcgtgttcgtccgcggtgccacccggggtgacggacgggtgggggaggacgtgaccgaaaatctgcggacgatccggtccatccccatgactctgccggagaagctgccccgcctcatcgtgcggggcgaggtgtacatggcccgcagtgtgtttgaggagatcaacgcccggcgtgagatcgagggcaagccactgatggccaatccccgcaacgccgccgccggctccctgcggcagctggaccccaagatcgccgcccagcggcggctggacatcgcggtctttaatttgcagctggcggagggccgggaattttccacccacacagagacgatcgactatctggccagtcagcatttcaaggtgattccccacaagcggctgtctgcgccgtcggatatcctggcggagatcgcggcgctgggcgatggccgtgagcagtttcctttcgatatcgacggtgcggtggtgaagctggacgacctgcatgaccgcgaggttatcggcagtacggcaaagttccccaaatgggccattgcatacaaatatccgccggaggtcaagccgtcggtggtgaaggatatcgtggtacaggtgggccgcaccggtgtgctgacgcccaaggcggagctggagccggtacggctggcgggcacgacggtcgcctttgccacgctgcataaccaggattatattacccagaaggatatccgggtgggggatacggtgttggtgcggaaggccggcgagatcatcccggagatcgttgaggtggtggcggacaagcgtcccgccgggacgaagccctataccctgcccgagacgtgccccgtgtgcggcgcaccggtggtgcgggacgaggacggcgcggcgctgcgctgcaccggcgcggagtgccccgcccagctgctgcagtacctgacccactttgccagcaggggcgctatggacattgacgggctgggacctgcggtgatgcagcagctgatcgacagcggacttgtccggaccgccgcggacctgtacagcctaacgccgaagcagctggagccgctggagcgcatgggcaaaaaatcggcgcagaatgcggtggacgctatcgccagaagccgggacaacgacctgtggcggctcatcaacgcgctgggcatacggcaggtgggggagaaggctgccaagacgctggcgcagcggttcggcactatggacgcactggcagcggctccggaggaggagctgactgccgtggacgacgtgggccccattaccgcgcggtatctctgccagtggatgaaaagcccccagtcccgcgatctgctggcgcggctgaaggccgtcggcgtcaatatgacctgtaaagagaaaacggttgacagtcgttttgccggaatgacttttgtgctgacaggcacgctggaaaagtttacccgagacgcggcggcggagatgatcgaaaagcggggcggcaaggccgccggctccgtgtcaaaaaagaccacctatgtggtggccggagaaaatgccggcagcaagctgcaaaaagcagaggcgctgggcattcccgtgctgacggaggacgaatttttagcacttctggactgaggaggcaatcaatatggcagtgaatacggataagacattgcagcatcagctgatctacagcgtgttcgtgcgaaaccacacaccggagggcaccttccgtgcgctggaacgtgatctggaccgattgagcgccttgggtacggatattgtatggctgatgcctatccatcctattggcgaggtgggccgcaagggcacgctgggcagtccctacgccatccgtgactaccggggcgtgaacccggagtacggcaccgtggaggatttccgccatctggtgggcgccatccatgtccggggcatgaagtgcatcatcgacgtggtgtacaaccacacgtcgccggactcggtgctggcccagacccacccggagtggtttttccgggacgagcagggtcggcccagccgccatgtggcggattggtgggatgtagtagacctggattatacccacaaggaactgtggcgctaccagatcgatacgctgaaaatgtgggcggagatcgtggatggcttccgctgcgatgtggccagcagcgtgcccctggacttctgggcccgggcgcggcaggaggtggaagtggtccgccccggctgcatctggctggcggagagcgtacacggcgcccatgtgctgggtctgcggcggcagggtgcctattgcgccacggatacggagctgtaccgggccttcgacatgacctacgactatgatatctggccgtggttcgaagggtacctgtccggggaaaacagcctgcggcagtacatcgatatgctgaactaccaggagctgacatatcccgcgggttttatcaagatgcgctgcggtgagaaccacgacacaccgcgtctggcccactgggtgcaggacgaacggcggctgcggcactggctggcatttttgtacttctgtcggggcagtatgctgctctacggcggcacggagtttgcaccgcgccgtcaggtagggctatttgatgcggacgataatttcggcgacaagcggtctgacctgtcggacttcctgcgccggtgcaaggccatgaagcagacgctgccgctggagggtgcggtgtggtacgaggtcagcggcggcgctgttatcgggcactataagtccccggcaggggagcgcaccggcgtatttgatctgtccggctgcggcggccgcgtatcggtggcgctggccgacggcatgtacaaaaatcaactgggcggtgatttgaccgtcaccgatgggcaggtcgatatcagcggcgagccgatggtcatctgagttgtacttttcaccaaaacagggagcgattttgtagcagttgttacagaatcgctccccctgcattgattattgcgcgcgtgaatggtataattaacactgttttaatgcgcccgcccgaaaagcgggatacttctatgtttatagaggaggaaagaaaagaatgagcaaaatcatgaagatctgcgacggcaacgaagcggcggcgtatgtggcatacgccttttccgaggtcgctgccatctatcccattacgccgtccagccccatggcggagcacgccgatgcctggtcggccaacggcaggaaaaacatcttcggccagccggtgcgtctggttgagatgcagtccgaagccggtgcctgcggcgcctgtcacggtgcgttggaggccggtgctttggccaccagcttcaccgcgtcccagggcctgatgctgatgatccccaccatgcaccgcatctccggcgagcgcctgcccggcgtgctgcacgtggcgtcccgtaccgtgggcacccatgcgttctccatcttcggcgaccactccgacgtgatgaactgccggcagacgggctttgccatgctgtccagcggcagcgtccagcaggcggcagatctggctgctgtggcgcatctgagtgccatcaaggcgcgtatcccgttcctgcacttcttcgacggcttccgtaccagccacgagatccagaagatcgacgtgctgacctacgacgagtacgccaagctggtggactacaacgcgctggccgccttccgcgccaacgccctgaacccggaggatccccggatgcgttctctggtggataaccccgatatctacttccagctgcgcgagtccaacaacacggcctatgccgagctgccggaaatcgtagaagactatatggcccagatcagcaagctcaccggccgcgagtaccacctcttcaactactacggcgcaccggacgccgagcgtgttatcgtggctatgggctctgtgggcggctgcgcccaggaggtcgtcaattacctgaacgccaagggcgagaaggtgggcttcctgcaggtacacctgttccgtcccttctcccgcaagcatctgatggccgctatgcccaagacggtgaagaaaatcgccgttctggaccgcgtcaaggagatcggctccatcggcgagccgctgtacgaggacatctgcgccgcctacatcaacgagagcgaccgccccgccatctacgccggacgctacggcctgtccagcaaggacaccacccccgcccagatcaaggccgtgttcgacaatctgctgttgggcgagccgaagaaccactttaccatcggcatcgtggacgacgtgactcatctgtccctgcctgtgggcgcgccgctgctgaccgaaccggagggcaccatctcctgcaagttctggggtctgggctccgacggtaccgtgggcgccaacaagaactccatcaagatcatcggtgagacgacagatatgtactgtcaggcgtactttgagtatgacaccaagaagtcctttggtatcaccaagagccacctgcgcttcggcaagcaccccatcagctctacctattatgtgagcagcgcggacttcatcgcctgccacaaccagacgtacctgaccaagtacgacattatccatgagctgaagccccacggcagcttcctgctgaactgcgagtggacggagaacgagctggagcagcatgttcccggcgagatcctcaagtacatcgccgacaacgacatcaagttctacatcatcgacgccaacaaggagtctcaggcgctgggtctgggcaaccgctccaacatggtgctgcaggccgccttcttcaagctggccaacgttatccccgtggaggacgccgtggcccacatgaaggacgccgtcaaaaagacctacggactcaagggcgagaaggtcgtcaacatgaacatcgccgccgtggatgccggtatcaacgccctggtggaggtcaaggtgaagcccgaatggacgaacctcaccggcaaggcgttgaagcccgccgacgagagcctgccctacgtcatcaagaacattctggtgcccatcaacgcccagaagggcgatgacctgcccgtttccgccttcaagggcatggaggacggcaccatgccgctgggcacttccaagtatgaaaagcgcggcatcgccacccatctgcctgtgtgggacgctgccgagtgcctccagtgcaatatgtgctccttcgtctgcccccacgccgtcatccgacccttcctgctggacgagggcgaggtaaaggccgcaccggtggatatgacgctggtggatgccaagggccccggcctggccggcctgaagtacaccatgggcgtctccacgctggactgcaccagctgcggcagctgcgtagcctcctgccccaagtccggcaaggcactgaagatggtccccacccacgaggtgtctctggaccagaccgactggaacttcctgaccaccgtgaaggaaaagacctcccgcgtggacaaatttaccctgaagggtagccagttcaagcagcccctggtggagttcaacggggcctgtgccggctgcggtgagacgccctacatcaagctgctgacccagatgttcggcgacaagatgtatctggccaacgccaccggctgtacccaggcctggggcgcggctatgccctgcgtaccgtactgcaagaacgccgagggcaagggcgtggcgtggtccaactccctgttcgagaacaacgccgagttctcctacggtatgtgcctggccgtcaagcagctgcgtgattgcgtcaccggctacgttaaggagctggatgccctgaccaaggacgaggccgtcaaggccgccatcgccaagtatatggagacgtatgatgacctggacgcctccacccccgccactgctgagctggtggcactgctggagaagggcaagttctccgccgacgagcagaagctggtggatgagatcctaaagcgcaagaaagatctctccaagaagaccatgtggatgtacggcggcgacggctgggcctacgatatcggctacggcggtctggatcacgtgttcgccatgggcgaggacgtgaatgtcctgctggtggataccgaggtctactccaacaccggcggccagtcctccaaggccacgcctgtgggtgctgttgcccaattccaggccagcggcaagaagaccaagaagaaagaccttggcatgctgatgatgacctacgacaacgtctatgtggcccagtgctccatgggcgccaatcccaatcagctgatcaaggccatcaaggaggccgaggcccacaagggtccgtccatcgtcatctgttacgcgccctgcatcaaccacggcatcaagaagggcatgaacaacgtccagcaggagatgaaggacgccgtcaactccggttattggaacctgtaccggtacagcccggagaccaagacctttaccctggacagcaaggagcccaccatgcccctgtacgacttcatgaagggcgaggttcgttacgcctctctggagctgagcttcccggagaacgccaaggtgctgttcgccgaggcggaggaagccgccaaggagaagtacgaatcctataagcgccgcgcggagaagtaagccttcgcagcaaacgccccggccattaggtcggggcgttttttcctgtatctgcggcttccggatgcggaaaagggagggggtagccgtgcaccgggcagacgggggatccagggaggaaataacttattccgataagaaaaaattgttaaactgttgacagacagatgggcaagtgataaaattaacaaagtaaaaaatgcagcagcacaggatgcggaaagggagaacactatggcgagaccgtttgactacacagcggaatacaagcgtaagctatgcaccgccgatgaagcggcacgggtggtaaaaagcggcgactggatcgacatctccatgggcacgggttttccgtctctgatggacgccgccattgccaagagaaaggatgagctccgcgaggtcaagatccgcggctatctgatcttcgacccgatccagatggtggagtgcgaccccgagcgcaggcactttgtctacaacagctggcatatgtccggctatgagcgcaagctctgcgaccgtggactgtgtaattttaatcccatggtgttccgcaacctcagctggtattacagccagttcctcaccgtcaacgtggccatgatggctgtgacccccatgaacgagcacggctacttcaactttgccggtgccacggcctccgctcgttctacgctggacaaggcagacgtagtcattctggagatcaacgagaatctgccctgggtctacggcggtctggacgagtgcatccatatcagcgatgtggacatgatcgtagaggggccccatggcccgctgcccagcgtcaagtctcccgccgccaatgaggcggagatgaagatcgccgaatacgtggtgcagaacatggtggacggctccaccttacaactgggcatcggttctctgcccaacgcggtgggccagatgatcgccaagagtgatctgcgggacctgggcatccataccgagatgctgtgcgacagctatctggatatgtacaaggctggcaagatcaccaacaaccagaagaagctggatcgctacaagagcatcttcggcctggccatcggctcgccggatctgtatgattggatacgggaaaaccccggcgtggtcacctatcccatcagctactgcaacgacccggccaacgtgggcaagcaggataattttgtttccatcaacaactgtatctccgtcgatctgtacggacagatctgcgccgaaagctccggcacccgccagatcagtggcaccggcggtcagctggacttccttgagggtgcggcgttgtctcacggcggcaaggcctttatctgtctgacgtcctcgtttacggataagcagggaaatgtgaagtcccgcatcaacccgctgctgacccccggcgacatcgtcaccgacccccgcagccaggcgtactacatcgtcaccgagtacggcggcgtgaacctggtgggctgttctacctgggaacgggcggagaagctgatctccattgcccaccccatgttccgcgatgacctgatcgccaacgcggagaagcagggcatctggatcaagtccaacaagcgctgaaaggtacatagcaagagggagatggccctacgccgtctccctcttgacattttcctgcggatatagtatacttcctgcatatgaaatcggcgatgacgggaagcagtaggcggtcagcggatgccaagagagggcgcggcaggtgtaagcgcccgtgatgccccgcccaagtcgtccctgagcttcgcgctgaactgacagtaggctgcggcggtttgccctccgttaccggggcggggtgttgctgcacccatgagcgcgggagcgatcccgaatacaggtggtaccacggacgttatgttcgccctgttttgcactggcaaaacggagcggactttttgttttgccaaataccgaaaaaggagtacagatatgaaagaactgcccaaggtctatgacccgcgggacgtggaatcccgcatctacaagctttggatggacggcgactgcttcaaggcggagccgaacccggacaagaagcctttttccatcgtcatgccgccccccaacgtcaccggccagctgcacatgggccacgccctggactgcaccctacaggacatcctgacccgctttaagcggatgcagggctacgaggcactgtggctgcccggcagcgaccacgccggcatcgccacccagattaaggtggaggaggaactgcggaagaacgagggcttgacccgttacgatctgggccgcgagaagttccttgagcgtgtgtgggcctggaaggaaaaatacggcagccgtatcgtggagcagcagaaaaagatgggcgcctcctgcgactggagccgtgaccgcttcaccatggacgagggctgctcccgcgccgtgcgcgagaccttctgcgagctgtacgaaaagggcctgatctacaagggcagccgcatcatcaactggtgcccccactgcctgacggccctgtccgacgccgaggtggagtacaccgataagcccggcaatctgtggtatatccgttaccccctggcggacggcagcggtgacatcgtgatcgccaccacccggcctgagaccatgttcggcgataccggcgtggcggtgaacccggaggacgagaagttcaagcacctgatcggcaagacctgcatcctgcccattatgaaccgcgagatccccatcgtgggcgacgattactgcgagatcggcttcggtaccggtgccgtgaagatgacccccgcccatgaccccaacgacttcgaggtgggcctgcggcacaatctggaggtcatccgctgcatcagcgacgacggcaccatgaacgagaacgccggcaaatatgagggaatggaccgctacgcctgccgcaaggcggtggtggccgatctggaggcgcagggctacctggtcaagaccgaaccgtacagccacaacgtgggcacctgctaccgctgccacaacgatgtggagcccctgatctccgcccagtggttcgtgaagatggcgcccctggccaaggaggccatccgtgtggtggaggacggcaccatcaagttcgtgcctgagcgcttcaccaagacctatatcaactggatggagaacgtccatgactggtgtatctcccgccagctgtggtggggccaccagattcccgcctggtattgcgatgagtgcggccatatcaatgtcagccgtgaggatcccaccaagtgtgaaaagtgcggctgcacacacctgacccgcgaggaggacgtgctggacacctggttcagctccgccttgtggcccttctccaccctgggttggcccgacacggatgccgccgacctgaagtactggtatcccacctccgttatggtcaccggctacgacattatcttcttctgggtggcccgcatgatcttctccggcatggagcagatgaagaaggagcccttcaagacggtattcatccacggtcttgtccgtgatgacaagggccgcaagatgtccaagtccctgggcaacggaatcgaccccctggagatggccgagaagtacggcgcagacgccttgcgcttcaacctgatcaccggtaacagccccggcaatgatatgcgcttcttcgtggagaagtgcgaagccatgcgtaactttgccaataaaatctggaatgccagccgcttcgtcatgatgaacttgtccatcgacaaggtcgaactgcccgagaagttggagctggaggacaaatggatcctcagcaagctgaataccctgatccgcgaggtcaccgacaatctggaggcctacgagctgggcgttgcctccgccaagatctacgacttcatctgggacacctactgcgactggtatatcgagctgaccaagacccgcctgaacggcgaggatgcgcaggcaaagcaggccgccgagaatgtgctgtgctatgtgctgctgcgtatcctggagctgctgcacccgttcatgcccttcatcaccgaggagatctggcaggcgctgccccacgagggccggtacctcatctccgccaagtggccggagtatcaggatgcgctgcacttcccggaggccgaggccgctatggaggccgtcaaggacgccatctccgccatccgcgcccgccgcgccgagatgaacgtgccgcccagccgcaaggctcaggtcatccttgtgacggcgcagccggagaactatcagttgggcgcacacttcatcacccgcatggcctacgccagcgagctgacggtgctgaccgccgcgcctgccgacctgaccggcatggtgaccgtcgccacccacgacgccacggtgtatatgcccatggcggagctggtggacatcgccaaggagctggagcgcatcgccaccgagcgcaaaaaggcggaggagaacctccagcgcatcgaggccaagctggccaacgagtccttcacctctcgtgccccggagaacgtggtcaacgcagagcgcgaaaaggccgaaaaggcccgggcgcttatcaccaagctggacgcctccgctgcagcaatgaagctgtaaagctatagtgcttcacagttattctgatgtaaaaacgaaagcaaagcccagcccgccgtgtgcaggaccggacaaacaaaaaagacgcctttcggcgtcttttttgtttgtccgcaaacgggaatatgcgctatatacgcggcccgctgtgccagattgaccgccgttccggcgccgaaaaacatggtgctttccaaaatttttcgcccttctgacgggtttcgacaaattccgcgcgtcggatagtctataatcaacgcagaacatcgaaccgcggagttttttctggcaggcacggcctgcggcacacaccaaagaaaaaggagcgttcaaatggaagtatcggcaaaacacgagggcaaaacgctgacattctttctggtcggcgagttggaccaccatggggcaaaaggactgctggaaaatctggagcgcgagatcgagcggacgctgccactgtcgctggtgctggatttttccggcgtcacatttatggacagctccggcatcgccgtggcgctgcggggttggcagcggatgcgggagctgggcggcgccgtaacgctgtatcatgtggcgcagcagccaagaaaggtgttcgaagcgtcaggcgtcggacgcatggtgacgatcgtttgaggagggagtacatactatgacgcgagctgaaaactacgtgacactggaattcctgagccgcagcagcaacgaggggtttgcgcgggtggcggcggcaggctttgccgcccaactggaccccacactggatgagctgggggacatcaagaccgccgtcagcgaggcggtgaccaacgccatcgtccacgcctatccggatcagttgggtaaggtggtgatgaagctgaagatattgaaaggggggatgctggagatcacgatccgcgactgggggcgcggtatcgaaaatgtggagcaggcccgccgtcccatgtataccaccggcggcagcgagcgcagcggcatgggctttacgattatggagagcttcacggatcggttggtagtgcggtctgttccgggaaaggggaccacagtgcagatgcgtaaacggatcgcgccgcggctggcgatacgatgagcgaccggctggcactgctggaacgggcccagcagggcgatgaccgggcggaggcgcagctgctgacggagaacgcgggattgatctggtccatcgtccgtcgttacaatggttgcggtgtggagacggatgacctgtatcagttggggtgcatcggctttgtaaaggctgtaaaggggtttgacctcacatacgggacgcagttttccacctatgccgtgccgaaaatcgccggcgagatacgtcggttcctccgggatgacggtccggtaaaagtgggccgcaccatgcgggaaaaggggcagacactttgggcggcacgggaacggctgcaagggcgtctgggctgtgagccaaagctgtcacagctggcagcggagaccggcatgacaccggaggagatcgccgccgtggatctggcgctgatcgcaccggactctctgcagcaggagaccgcggagggcctgacgctggagtccacactatgtgccgaggagcccagcgtctctctggtggagcgtatcgctctgcgggacgccatcgacgcactgccggagaaagaacggaagaccattctcctgcgttttttcaaggggttgacgcaggagcagaccgcccgcatcttacaggtatcgcaggtccaggtctcgcggctggagcgccgcagcctgcaaaagctgcgggacctgctggcagaggagtgacttcgggcagagacggcgtaaaaagggaggcgtctcgacagcagcgcgatttcgaatgtaaaatggatcaggacagagggggctctattgcggaacgctcatcccgttatcggcgggatgggcgttccctcgtaacggaaaggtgaaacgctttcccggtatctgtctctcagccgtccgttccggaggcacccggcagcttcggcgaggcgccctgctctttttcgtattccaaaggcaaaaactccgtcatggtcccccgataccgtttcggcataaacgtgttctgacaccggggattttcgcgctcccgaatggcgacgctttggaaaaactgcttccacagcgagcgaaagtacaactcgtcctctccgggcagcgtgggctgaaagtgctccatccgcataatgcgggaacggcctccggcatacagcagcagctctcgatgggtgcggtcatagataaagaattgctcgttggcatagcgctggcagaaatggccgcgcagcagcggcagcacacggtttttgggctcgatctccgcgcccagtgtaccgccgtagtccgaaaaccgcacaaaaccgcgcagtttttccagctcgccgttcatatggcggatggcgcgatacagcggatagcaggccgggtcggacagatcgcgcataaagccgggtccctctgccaacagcttccggataaaggcgtacaaacgggcttccttgtccggcagacacgttaaaaagccgcggcgcaccacggccagcgctttgccggaccgggcggcgataccgcggctgacccgctgactgtacgccggctgggtgatcacggtgcgaacctcatagagggagagggggtcttcgtcgcagcagaaggcggcgggggcctccttgtacacatagctctcatatacgcagcacagaaaaccatccaggctgccatcatattgataaatcacgtcattcatacggcttctcctaccggatcaaagagagacaactgtgcagcctggtccgaaggcagcgtatcgcgctccagtcgttccagctgcaagggcagcgtagcaggggagaagtgcagtccctccggtatccgcccgccgcaggtaataaagtactgcgcccgtttcagcaccacgcccagctttttcaggtcctcaaagcgtagggtaccgccgcagcgccgtgccgatacgatgcgccgcgcactggtggggccgattccgggaacgcgcagcagcgtctccagatccgcccgcatgacctcgacagggaactggtccagatgctgcagtgcccagctgcattttggatccagccgcgggtcaaagtccgggtgggcgtcatccagcagctcggcggcccgaaaaccgtaaaaccgcaggagccagtccgcctggtacaggcgatgctcccgcagcagcggcggtttggtgtccagggatggcagcaggctattttccaccaccggtacatacgcggagtagaacacgcgcttcagcctgtacttgcgatatagtgactccgtcaggtgcagaatgcgccggtcgctgtcgtcggtagcgcccacgatcagctgtgtgctctgccccgccggggcaaacaccggtgcgtgccggtacttcaccagctccgccttactctgtgccgcgccgtcgcggatcagtcccatcgggcgcaggatcgcctccctggtcttatccggggccagcgcctgcaaaccctgctgactgggcagctcgatgttcacactgagccggtcggccagcagtcccagctgatgcaccagctccggcgccgcaccggggatagctttggcgtggatgtaaccgttgaaacgatactcctcccgcaggatacgcagggcccggattatctgttccatggtgtagtccggatcgcgcagtacgccgctggagaggaacagaccttctatgtaattccgccgaaagaagccgatggtcagttccgccagttcacggggcgtgaaggcggcgcggcgcgtatcattgctgcgtcggttaacgcagtacttgcagtcgtacacgcaggcattgctcaacagcaccttcagcagcgtgatgcaccgcccatcggccgaaaagctgtgacagcagccggcgatggaagaggaggtgttgccgatcatacccggccggaatccgcggcgcacgccgctggacgtacacgccgcgtcatatttggccgcatccgacaatatcgccagcttgtccagcagctccatgcttttatgccatgcggcggcgccggggcgccggcctgtcaatacagtcgatgagccgcagtacattggcggcgatggaacccgcgcccagcagcgtgataatgagaccaaaagttgtcatagttgtgtcctccttgctcgaactgttgttctggtaatagtataaatcgaacaagcgttcttgtcaagtgaaatcgaacaaaaattctataaatttcatttgcggttgaccgggcgcggaagttgtattaaaatgagagcaacgaacgagaaagacgaggcccctctatgacggatctggaaaaacgctttatcaaggcccggcgcgatgcgatcgcggtggattatcagaatttgaacgactgccagcgccagggcgtgctggccacggaggggccgctgcttctgttggcgggcgctggctccggtaagacgaccgtgctgatccaccgggtggccaatctgctgcggtatggtcgtggcagtgataccgaggagataccgattcccatcagcgaggacgaggtatcgtttctggagcagtatgccaaggtgccggactcggcgcagcacgctctcgtggagtatctctgcgcggtggaaccggcccgtccctgggaggtgctggctatcaccttcaccaacaaggctgctaacgagctgaaggatcgcctggggcggatgctgggggaggaagctgccgccgatgtgtgggcgtccacgttccactccgcctgtgtgcgtatcctgcggcgagacatcgaccgcatcggtttcgaccgcagctttaccatctatgacagtgatgacagcaagcgtgtggtcaaggacattctcaaggagctggggctggaggagaagtcgtttccgccccgcgaggtgcagtcggtcatctcccgcgccaagaacgatatgcagtcgccggaggaatttctggagcagtggcaatcgatcaacgactggcggaaaataaggatgggtaaagtatatacactttacaataaaaagcttcgtgaggccaatgcgctggactttgatgacctgctgtggcacacggtgcgcctgctgcagacggcgccggatgtgcgggagtactaccaacggaagttccgctatgtcctcattgacgagtatcaggacaccaacgcgctgcaatacgagctggccaagctgctgacgggccccgcccggaacatctgtgtggtaggtgacgacgaccagagcatttaccgcttccggggcgcggatatcaccaatatcctcagctttgagcggcagttcaagggcgcgcgggtcattcggctggaacagaattatcgctctacgcagaatatcctggacgcggcaaacgcggtcattcgcaacaatcagggccgcaagggcaagaccctgtggacggagaacggctgcggcgagctggtgacggtaaagaccaccttcaacgagagcgacgaggccaactttgtcctggggcagatcatgatgtactaccgccggggcggcagctggggtgactgtgcggtgctgtaccgtaccaacacccagtccaacgcgctggaatacgcctgcaagcgcagcggcatcccctataagatctacggtggtctgaagttttttgaccgggccgaggtcaaggatatgcttgcctatctgtgcgtcatcaacaaccccacggacgatctgcgcctgcggcgcatcgtcaacgttcccgcccgcaagatcggccaggccaccgtggacaaggcccagattattgccacacagcacggcctgacgctctacgacgtattccgccgtgcggaggaattccccgagctgaaaaatgcagctggcaagctgaatacctttacagagatgatcgaggaaatgcgccgccgcctgccggagagtgagctgccggagttctacgattacgtctgcgagcgaagcggctacgcgcccgccctgcgggagaaggacgatatggagagccggggccggctggagaacgtgcaggagctgcgctccagcatcctggcctacctggaaaacgccgagggcgcggagacgagtctctccggcttcctggatgagatcgcgctgtacaccgacctggacagccgggtggacggcgacaactgcgtgaccatgatgaccatgcacgccgccaagggcctggaattcccccaggtatttgtggtgggcatggaggaggggcttttccccggaaatcgcgccatgggcgatggcgacgagatggaggaggagcgccggctgtgctatgtggccatgacccgcgccaaagagaagctgacgctgaccaacgcccgccagcgcacgctgtacggtaaaacaacaccctgtatgccctcccggttcctcagtgagatcccggagaacaacatggagtggctgtccaagccggtaccccgcagcgacacctgggaggactctcgggacgatgatggctgcgcttacggttacggcggctatacacgtcagggtaccacagcaccgacgcgccgcgaggtacctgccgcgtctcgtcccggctcgctgcatacggccagaacggcggcaaaagcaccgtctaccgcctcttacatacagctgcaggcaggggagacggtggagcacgacgctttcggcagaggcctggtgctctccgtgcggcctatgggcggcgatgcactgctggaggtagccttcgatacggtgggtaccaagaagcttatgctgaaggccgcctcccatcatttgaagaaggtgtaaagcaaagtaattttataaatacggaaggagaacggatatggggttttggttcggctttgacacagggttcgacatcatgcaggtatttgttttcgcgatatttgccatcgtcatcgtctgcttcatcgccttagcggtaaagggcattggcacctggcacaagaacaacaactctccgcgcctgacggtgcaggcggctgttgtcgccaagcggcagaataccgatgtgcaccaccacagcaataacaatggcggtatgcacaccagcacctccactcactattacgtaacgttccagtttgacagcggcgaccggcttgagctgcacgttcccggaagggaatacggcatgatggcggagggcgacgtgggcgatctgacgttccagggtacccgttacctgggctttgaccggcacaccgcaggggccgttcccgaggccggacccgtcacagcagaggacgtcccgccgcggtacacggagaagaaaagctgggacccagagctgtgaaaatcattaaaaaagcacagacaccctgcttaaaaggcagggtgtctgtgttctccggaaacgcaaaaagctctgcgatacatcgcagagcttttaactgtgcagttcagacgcgatcagatcgtgcgggtaaccttgccggaacgcaggcatcgggtacaaacatacacatggcgaggcgtaccgttgatcacagccttcacgcgcttgacattgggcttccaggggcggttggaacgccgatgagagtgggacaccttgataccaaaggtcacgcccttgtcgcaaaattcgcactttgccatccgttgcacctccttgctgtcataacatacctcttgcatcgcaagcagttgatataataacagatgtgcgccgaaattgcaagtattatttgacaaaaaaacgaattttttttgcatggggaaagtgttgcgaaaaagcgcgccgcaagatataattaaaagaagtatattcgcccgtttccgggcaggaggagcgcccatggaaaaagtgaaacgcacacccgccagcctgaaaaaaatggtagagaccttcggtatggaaatactgcaccgcggcagcgactatgacagcgcggtgatcaccatttccgacgtgaatcggcccgccctgcagctggtaggcttttacgattattttgacgacaagcgcctgcaaatattgggacggggcgagatacgctatctggagcgcatgaccgaggcagagcgtctgcgggtgttcaaccagctgatgagctatccgttcccggcaatgatcgtggcgcggaatatggaggcgccgcctgagctggtgcagatggcggacaagcacgaccgcacgctgctgcgggcggtggactccacggtggatatcaccagccggctcattgactacctgaaccgggtaacggccccgcagatcacgcggcacggcgtcttgatgaatatctacggacagggcgtactgatcctgggcgacagcggcatcggcaagagcgagacggccattgagctgctcaagcgcggtcaccggctggtggcggatgacgcggtagagatccgccgggtgtccaactctctctacggcacggcgccggagatcatccggcactatatcgagatacgcggcgtgggcgtcatcgacgtgcagcagctgttcggcatgggcgcggtgcagttcgacacggagatcgacctggtgatccagctggaacagtgggaagacgggaagttctatgaccggctgggcctgggcgaggagaaatacaccatgctggatgtgagcctgcccatcgtgaccatcccggtgcggccggggcgtaacctggcaggcatcgtggagatcgccaccatgaagaaccggcagatgaagtacggctacaacgcggcacgtgacttcgtgacgcagtttgacagcaaggtggacgccatgctgaagaaaaagagcacaacgggcgaggcggagaacagatgaaatacgttggcgtagacattggcggcaccaacctcaaggcggggctggtggacgaaagcggaacgctgctggcgacacagaagatgaaggtcgcgtccatcgtagaccgtgaggggctggcgtggacagtggcgtcactggtgcaggagctggcaaaggcggccaatattccggtcagtgatgtggcgtcggtaggcgtcggcgttcccggaacggtggatatacgggcgggttctatcgcgtatacctgcaaccttcccctgcgggacgtgccgctgcgaaagctgtttcacaaatatctgaatatcccgctgtacatcgaaaacgatgctaactgcgcggcgctggcggagttccatgtgggcgcgggacgcgagagcaagcgctttgtgaccatcacgctgggtaccggcgtgggcgcgggtatcatccacaacgggaaaatataccacggcgccaacggtatggccggtgaggtgggtcacatggtcatcgagcagaacggcctgccgtgcccctgcgggcggcgcggctgctgggagcaatacgccagcgccacggcgctgaagcgcatgacggcagaggcactggcggcctacccggacagtattctggcgcgggtcatcacggagaatgacggacacgtgtccggacagtcggcgtttatcgcggcccgcgagggtgacccggtgggacaaatggtgtgcgaccgatacgtggactacctggcctgcggcgtggtgaacgtggtgaatatctttcagccggatacactggccattggcggcggcgtcagcaatgaagcggacgagcagctgctgctccccgtgcagcagcgggtggccagagagagcattccctgcggcaaggaccggcggacgcgcatcgtcaaggcgcagctgggcaaccgggcgggtctgatcggcgcggccctgctgggaaagaataagcgtatctgacaggggcatatactaccgctggcagtgtagggaaccccttattttcaaagcttggaggcattatgagctggtacgaggagctggacaaatgggcggcggactatctgccggatatggaatatgagaaggacgcgccgctggatcggtatacctccttccgcatcggcgggccggcgcggcgcatggcctttccccgcagcggggaggcggcggtactgctggtgagccatgcactggagctgggcgcgcggccctttgtgctgggaaacggcaccaacgtgctcttcccggatgagggcgtggagcgtctggtgatctgcacccgggacatggcgtgtgtggcggctggtgcggtcgcaggtgagatcacggcagagtgcggcgcatcactggcaaagatcgctgttttcgcgcagaaggcagggctttccgggctggagttcgcccacgggataccgggaagcctgggcggcgcagtgtgcatgaatgccggtgcctatggcggggaaatggcacaggtggtaaaggaagtgaccgtgctgttccccgaggatggtgtcaagaccctcagtggagaagaaatggcgttttcctatcggcacagcctgctgacagagcaacccgacacggtggtgctgcgggcgacgctccgcttgcaggccggtatccccggggagatacgggagaaaatggacgagctgatggcccggcgtaaggcgtcacagccgctggagtatcccagcgcgggcagtacctttaagcgcccggcgggccactatgctgcggcgctgattgatcagtgcggcctaaagggactgaccgtgggcggcgcacaggtgtcggagaagcacgcagggttcgtcatcaaccggggcggggcgtcctgcgctgatgtgacagctctcatggcagagatacaaaagcgcgtgcgggagcaaaccggcgttgtgctagagcctgaggtccgggtcattacttgaattacgaccgcatcgatcacaggtgtttcaatggccttgatagaaggtatataaaatgtgccagtaagtatacaaaaatgttacagtaaaggtaataaaaaagaacgcaaaagtgcagcaaaaataacgccgtaccgggcttgtttttgacgggattccgaatcacgcttgacggcgggggaggatactgaattggaaatactcattatttcgggaatgtccggtgcgggaaagagccgcgccgccatctgtctggaggacagcggctactacatcgtggacaacctgccggcggagatgatggtcaaattcgccgagttctgcgcggccgccggcggccggtatgaccgcttggctttcgtgtacgacgtgcgggccggggagccctttgaccggctgaccggcgcggtggaagagctgcggcggcagggcctgcgatgtcgactgctgtttttggaggcggacaccaagaccattatcaaccgctataaggagacacggcggagccatcctctgtgcggtgacggggcctccattgaagaagcggtagcgcgggaacgggcgatgctggcaccggtgcgggcgcaggcggacctggtgctggacacgtcggcattttctacggccaagctgcgtagcacactgctgacgctgctgggcggcggcagcggtggaggactgcatgtgacggtgctgtccttcgggttcaagaacggcctgccaccggaggcagacctggtgctggacgtgcggtttttgccaaacccctactatgtgccggagttaaaaaggctgaccgggctggatgtggcggtgcgcgactatgtgatgaacgcggcggccacggaggaattctggcggcgtctgacgccgatagtggattatttactgccccagtaccgacaggaggggcggacggagctggtgctggctgtaggctgtaccggcggtcggcaccgatctgtagctgtggcgcaccggctggcggcatacattgacgcgttgggcttttccgtggcggaaagccacagggatatggggcggtaagtgtgttccgcacctgcggtcggagcaaaaacaggagacgatgtatgagcaaatacgataaactctgggaatatgtgtttaaggatggacgggatcaatttacgctgtcgttcgaggaaataggacgtattgccggtgtgcccatcgaccacgccttcctaacgtataaaaaggagcttgcggcatacggctaccgggtggaaaagatatccatgaaggcaaaaacggtggctttccgccgtgcggaacagtgaggtgaagggtcatgatctcatttgcgggaaaggtaaaaaatgagctgtgccgcgtggggataggccgccagtgctgcgcccgggccgagggctacggtgtgctgctgtacggcaacacgttcacgcccggagagatacggatcatcacggagaacggagacttcgccgcgcggctgccaaagctgtttcagaaggcttttggggtgaaattcgaccgggtaccggaggaaacgaacggcaaaggaaagctgatcttcggcatcacagcgccggaaaagttggaaaagatcatcaacacacttggctatgatgcgaggcagttgacggcgctgcacgtgaacttcggaatactggaggaggactgctgccggacggcgttcctgcggggggcatttttggcgggaggcagcgtcaccgacccagagaagcggtaccatctggagctggccaccagtcatgtgccggccagccgggaggtacaggcgctgatggaggagatggggttcctgccacgttccatacggcgcggcgcggatgcacttctgtacttcaagcagtcagagcatatcgaggactttctgacgaagatcggcgcaccggcggcggccatggacatcatgacggcgaaggtggacaaggagatacgcaacggcgccaaccgggccatgaactgcgatatggccaacgtaaacaagacgctggacgcggcgcaggagcaggtgggcgccatcgagaagctgcgccgcagcgcccggtgggacaagctgccggaaaagctgcggcaaaccgcggcgctgcggctggaatatccggagctgtcgctggtacagctggcagagaagtgcgacccgccggtaacaaagtcgtgcatgaaccatcgaatgagaaagttgatggaggaggctaaggagctatgaacatgagagaacggtgcgaacgcgcggaggcgtacagaaaaaacggggccaactgcgcccaggcgctgctggcggcattcgcagatgtaatgggtattacggagacccaagcgctggctgtcggtgcggggttaggcggcggcgtgcgaagcgggaacatctgtggggcggtaaacgcgcctgtgatgatcctgggctgcgcgtttccggaaatggccgccagcaaggcgaaatccgcggagatcaccaaggaataccagcggcggtttatggagagatttaagcatctcaactgccgggaactgctggcggagaaggaattgcagcccactgacacggccatggcactggcggcaggggaccactgcgggctgcttattctcagcgcggcggagatactgtgcgggatgataggggagaagtaaaggagaacaggtatgggatttgtgcatctgcatgtacatacggaatacagtctgctggacggtgcgtgtcggatacgggacctgccgaagctggtaaaggagctggggcagacggcctgcgccattaccgaccacggcgtcatgtacggcgcagtggacttttaccgcgcctgcaaggcggagggcattcatcccatcatcgggtgcgaggtatatgtggcgcgtcggacacggttcgacaagcagcatgagttcgatgcggagtctcggcatctggtgctgctgtgcaagaacgagacggggtaccgaaacctatcatacatggtgtcgcaggcgtatatcgaggggttctatatcaagccgcgtatcgatatggagctgctgcgcgcccattccgacgggctgatcgccctgtcggcctgtttggcaggagaaattcccaagcggctgatgaatggtgactacaacggagccaaggcatatgcactggagatgcggggaattttcggtgaggacttttacctggaattacaggaccacggcatcgccgagcagaccgaggtgaaccggggtcttttgcggctgcacaacgaaacggggatacccctggtgtgtaccaatgatgcccactatctgcggaaggaggatgcagaaaaccacgacgtgctgctgtgtatccagaccggcaagacggtggatgacgagaaccgaatgcggtatgagccgcggaatttttatatccgttccacagaggagatggagacgctgttcgccggatatccggacgcggtggccaacacggaaaagatcgcggaggagtgccagctggaattcaccttcggcaagtaccacttgccggaattcaagctgccggaggggtacgactcgcctacatatctgcggaaactatgtgatgaggggtttgctcagcggtacggtcaggcaaagccggaataccggaagcagctggattatgagctggacatgatcgagaaaatgggctttacggactatttcctcattgtgtcggactttgtgcggtacgccaagagccggggaataccggtgggaccagggcgcggcagcgcggccggatctatggtgtcttactgcctggagatcacggacatcgaccccatgaagtacgatctgtactttgagcggttcctgaacccggagcgtgtgtctatgccggatatcgacatggacttcggcgacacgcggcggggtgaggtggtggaatatgtccgcaaaaaatatggcgacgaccatgtagcccagatcgtgaccttcggtaccatggccgcccgagcagccatacgggatgtgggccgggcgctgaacatgacctacgccgaggtggatgttgtggcgaagctggtaccggcagggccgggggcgctgcatattaccttgcaggaggcgctgaagctatcgaagcagctggcagatatgtaccgggaggagccaaaggtcaaaaagctcatcgacacagccatggcactggagggaatgccgcggcacgcatctacccacgcggcaggcgtggtcatcacaaaactgccggtatacgaatatgtgccgctggcgcggaacgacgatgcggtagtatgccagtatgtgatgacgactctggaggagctgggcctgctgaaaatggactttctggggctgcggaacctgacggtgctggatgacgccgtgaagatggtgcagcagcgggagccagagttcgcgctgagcaaaataccggacgacgacgcggagacctatgacatgatctcccgaggacagacggcgggcgtgttccagatcgagtccacgggcatgaccggtgtgtgcgtggggctgaagccacagagtattgaggatatcaccgccgtgatcgcgctgtaccgtccgggaccaatggagtccattccgaggtttatcgcctgcaagcacgacccgaagctggtgacgtataagcacccaaggctggtgcctatactgtcggtcacctacgggtgcatcgtgtaccaggagcaggttatccgcattttccaggagctgggcggcttttcgctggggcaggcggacatggtgcgccgggccatcagcaagaagaaggccaaggagatcgagaaggagcgtcaggccttcgtatacggcgatgcggaacgaggaatcaagggctgtatcgccaacggtatcgacgagaagacagcgcaggccatctacgacgagatatacgactttgccaactatgctttcaacaaggctcacgcggtgagctacgcggtggtggcgtatcagacggcgtatttcaagtgccattacaccaaggagtatatggccgcgctgctgaccagcgtgctggacaacagcgacaaggtggcggggtatatcggggagtgccgcgactgcggcatcgcgctgctgccgccggacgtgaaccggtccagcgatcggttcaccgtggagccgggcggcatacggttcggcctggtggccatcaagaacatcggacggggctttatccaatcggtggtccgggagcgggagcagggcggcagctttacgtctttgcaggatttctgcgaccggatgtacgactgcggcgacatgaacaagcgggcggtggaaaacctgatccgcagcggcgccttcgacagcatgggggcgcggcggtcgcagctgctggcggtgtatgagaaggtgctggacggcatcggcaacgtgcggcggcggaacgtggagggccagatcgatttcttcggcatgagcgccgccaacagcaccgtggagacggtggtgatgccggacattccggagtttaccgccacggagcggatgcacatggagaaggagaccacagggctgtatctgtccgggcaccccatggtggactatcgcgccacggcgcgggacagcggcgcggtgacgctgaacgaggtattggaggacgtgaacggcgaggagggccccacgcggttcgccgacgggatgccggtgacggtggcgggcatcgtggcgtccagcaagaccaggcccaccaagaacggctcgctgatggcctatgtggtgctggaggacgagacggcatccatggagcttctgtgcttttctcgggtgctggaacgatgcggcagctatctggcagtgaacagcccggtacttatcaagggacggctgagcctgcgggacgaaaagccgccgcagatcgtgccggacgtggtattcccgctggagagttgcggcgtgggggcgctgcaggacagcaaggccgcggagagcgacacggcggcggtgtatctgcgggtgaagagcatcgatgacccggcgttcagccatctgctgttggtggcgaccatgttcgaagggaaggtgccgctgaagatacggatcgccgacacaggaaagctgtggggcggcttctgcatggaccatccggcgtttttgaaggagtgccgggaatggcttgggccggagaacgttgtggtgcggaggaaggaaaagagcgaatgagtgtcagagtgcggcctgcgggccgcaccctttttgccttttgggcatagagtggaatgaaagaggccgtctttcactacttattgggaggtcattctatgcctgaaaatgtaatgccgggaccggtctgcgacctggggaacgtccgggaggctgtgtgcatccatacgcggaagatatttgactcatgcagggataaggactgcgtggaggatctgcgcttttaccccacggcggcggcgcaggaggtgctcagcgcgtcgcagatgatcaagggcggcacagcggagctgctatacgtctacaccgatgtggagccggtgacgttcaaccgggggttctattcggtggatatgcgcttctactaccgggtgactttacaggtgtgtaccggcacgccgcgatacactgaggtggaagggctgtgcgtgttcgacaagcggtgtatcctgttcggcagcgaaggaaacgccaagatattctcctcggacacggtgttcgacgagttggatgtgccgggacggatacggaccaatctgcctatcgccgtggtggaggccgtggaccccatcgtgctggacacccgtgtagcggaggtaccggtccctgtctcgacaggcagttgtttgtcggagatcccgtcctttgtggcgcagagcttcggtggagagctggtgttcgacgacagcgcagcgcggcggctgtacgtgacgttgggacaatttacactggtgcggctggagcgcgatacgcagctgctggtgccggtatatgactactgcgtgccccagagcgagtgcgactgcggcagccaggaggatccctgcgggctgttccgcagtgtggcgttccccatgaacgagtttttcccgcccaacgcggtggagacgccctgtgactataacagcaccaagaactactgtgcgtgccattgagaagcagaacagaggacggctatcgccgtcctctgctttttttcgcggggtttcgctttacaagcgggtaaaaattgcgtataataccaaaaaaggaggtgggcgatgtgggtatcgcgttcattcaggacaagctggagatcaagttcctgatcctgtacattgtgtcgcggctgacggaaccggtggacggagccgacttgcaggacatgaccatgtgcgacgagggcatcgactactttgattatgcggagtgtctgggtgacctggtgaagacagagcatctgcgtgtcacggaagacggacagtacatcatcacggaaaagggacggagaaacagcggtatctgcgagagcagcctgccatattccgtaaggcagctgtcagacaggcatatcgcggcttggaacaaggcggcggtgcggcggcagcaggtgcagggacgggtgacgccgcgtgaaaacgggacgttcaccgtggagctgcggctgcgggacgatgtggatagcctgatgacgttggatctgatggtggccgataaggccgacgccgaggcgttggcggaacggttccggagggagccggagaaggtatacacgcagatcgttgcggcgcttcgcggaaaataagaaagaaaaagcctccccgaccggggaggctttttgcgaggagagtgagttctgtacagaattacaatgttttggatcacacgctgaaaagaatatccgcataggtgggatacggccacgccttggcgtccaccagcgattccagccggccgatcagctcgccggccttctgggtgcgggtaacgatctcgcagcggtagtaccgtgcggcgtcgataccgccatccgcggcgggagcatcgctgagggcagcgtgcaacgcctcgcaggtatcaaacagcttctcacccaggtcggtaacacgctgggccagagtcttttccatgcgggcggacaaggccgggacactgttctccttgtgaaaggccgtctgggttaggcggtcggcgtaagcactggcggcggggagaatatgacgctggaccatgtccagcagggtgctggcctcaatggcagacaccttgcagtagttttccaggtggatctcgtaccgggcgcgcatctccgtctcggtgaggatagcgtgcctggtgaaaagctctacattcttccggtcgatgtaggcaggcatacagtccaccgtgtcccgcaggttagccaggccccggcgcttggcctcctgtacccaggcgtcatcatagccgttgccgttgaagatgatgcgctggtgggcggtgaagatgtcgtgcagcagcttctggagggcggactggaagtcgtctgccttttccagaatatcggcgaactggcgcagctcctcggccatgatggtgttcagcaccacattggggctggcgatggactgagaggagcccagcatacggaactcgaacttattgccggtgaaggcaaggggagatgtgcggttgcggtctgtggtgtcctggggtatctccggcaaagtgtccacgccgatggtgagctttttcttggtgatgtccacatactcagtgccctgaatgatggcatcaagaatagccgttaattcatcgcccagaaagatggagatgatggcgggaggggcctcgttgccgcccagacggtggtcgttgccgggataggacacgcagcagcgcagcatttcctggtactcgtcaacgcccttgataaaagcggctagaaacagcaggaactgggcgttctggctgggggtgctgccaggcttcagaaggttttcgccggtgtcagtggccagggaccagttgtcgtgcttgccgctgccgttgacgcccgcaaagggcttttcatggagcaggcacaccaaaccgtggcgggcggctacctttttcagcagttccatggtcagctggtttttgtcacaggcgctgttggcatcggagtagatgggcgcgatctcgtgctgggcaggcgcaacctcgttgtgctccgtcttggccagcacgcccagcttccacagctcctgatccagctcccgcatgaacgcggctacccggggtttgatggcgccgtaatagtggtcgtccagctcctgccccttggagggacgggcgccgaacagcgtgcggccgcacagcttcagatcctcccgctgacggtataccttctcgtcgatcaggaagtactcctgctcagggcctacctgcggcgtgacatgctgcgcctcggtgttgccgaacagccgcaggatacggatgcactccctgtccagcacacgcatagagcgcagcagaggcgtttttttgtccagcgtctgcccactgtacgaacagaaaatggtagggatatacagcgtctcgtccttgacgaaagcgtaagatgtggggtcccaggcggtgtagccgcgggcttcgaatgtagcgcggagaccgccggaggggaaggaggaggcgtctgcctcgcccttgctgagttctttggcgctgagctccatgaccacgccgtctttgccgtcgcgggtgatgaagctgtcgtgtttttcggcggtaacgccggtcataggctggaaccagtgggtgtaatgggtagcacccttctcaatggcccagtccttcatggcgttggcgatctcgccggcggtggtacgatccagcggcgttccctgggccaggcattgctgccatttctggtaggcggcggcggggagacgctgctgcatctgctgctcaccaaacaccattttgccaaacagagcgggaacgttcgtggtcttttcacacattgcgggatcaatcctttcaaaatcaagtacgcggcggcgccgcgggaaaaacaaaccgtatgggaaacggggcttacatgaacagctgcatagccagcggagtgacataggcctccatcacagcggccagggtcagcagtggtaccaccagcaatcccaccacgcgaagcaggtccagaagcaggggcttcatcatacctttttcgttgcagcggatgtatcgattgatatttctgcacaggcagagtccggcggccagactgagcagcagggcggggacctcaaagatgccgtgaggcacaagaccggccaacaacagaagccactggccatccatcagtgcggcaagcataccgatgatcgcagcgttgagtcccagagacagtgccggcagatacaggaatggtataaaaccataaagcacggtcatcaccatagcccgaaggttgttgccgaacagggccagcgcgctgaagctgccatcatcgcggataataccggcgtctgcaatgctctcgttgaaggtgcgtataatggttacgggaacattggggacaagtcttccgacaatgtaagccagcacggtcagtgccaaaaaagcaagggcagttatgccgacaaatcggccgtattccctgtgccagaacgcggcgatggcacaaagctgttttttcatgccagcttctccaggccggcgcggagacggcggagcgtttcatcacggcccaggatgcggcagatctccactgcgccgccgggggtgaccagcttgccggcagcagcgatacgtaccggccacatgagggtggcattcttgacacccaattgttcagctaaggcgatcaggccatcgtggatggcctcgtccgtccaccggggcagcgccgccagcatgggaatagccgcctccagcatggccttgcagacctccgggttcgtcttggatttcttgttggtgaagaattccacgtcgtactccgggcacgcatcgaagaagtccaccttctccgggatatctgtaagacgctcgcagcgcgcctgcagcagcgcggcgatggccgccacgtcaaagtcgcccttgacgctctggcggatgtagggctcggctgccttggcgaagtcctccggggacatggcacgcaggtagacggcgttgaaatgatccagcttggccttgtcgaagatggcgggagatttggaaataccggtcagatcaaacgccttgacaagcgcatcaagagagaagatctcctgctccgccaactcacccctgggactccagcccagcagagcaacgtagttgagaatggcatcggtcagatagccctctgccttcaggtcctcatagcttgggtcgccgtggcgcttggacatcttgttctgcgcgtcccgcatgacgggggagcagtggacataggtgggtacctcccagccgaaagcgtggtaaagaaggtcgtacttgggcgcggaggacagatactcgctgccgcgtaccacatgggtgatgcccatcaggtggtcgtcgatgacgttggcgaagttgtaggtgggcaggccatcccgcttcagcagcacctgatcgtccagcgtgctgttttccacggtgatgtcgccgaaaacggcatcgtgaaacgtggtggtaccctccttggggatgcgctggcggatgacgtaaggctcgccggcgtccacgcgcttcagcgcctcggtgagcggcaggtcgcggcaggggtcgtcggcccggtcgaagtcgccggtgtcctcctcggaggcgcacttttcgcagaaacagtaataggcgccgcccttttccgccagcaagcgggcgtatttgccgtaggtatcccgacgttgggactggatatagggagccacgggaccgccgatgtcggggccctcgtcatggttcagatggcactcggccatggtgcggtagatgacgtcggtagctccctccaccagccgtccctggtcggtatcctcgatgcggaggataaacgtgccgccgttactgcgggcaatgagccaggtatacagggcagtacgcagattaccgatgtgcatataaccggtaggggacggtgcaaagcgtgtgcggaccttgcccgtggggatcttggcttccatctcggtaaaataagcggcgtcagacataggggtggacctccgttacttgttaaaaatactataatagtatactggttttacgggaaaagtcaatgcttacggacgatttcgcagaatgtccaaatgtttggaatgtttcttgcaatttgtggggagatttggtataataactgcgaagcggccatgatacatggatcgccatttcgttttacccgccgcaaggcacgactataacacagaaaggaacatcgtcactatgatctacacgacggaagtacagcatatgtgtcctgtcgccaagggcgcttatcacggtccggctcccattcccgaggagggcaagtgggtacaggccaagcagatcggggatatttccggctttacccacggtatcggctggtgtgcaccccagcagggtgcctgcaagctgacgctgaatgtgaagaacggcgttatcgaggaggcgctggtggagaccatcggctgctctggtatgacccactccgccgccatggcttccgagattctgatcggcaagactattctggaggcgctgaacaccgacctggtgtgcgatgccatcaacaccgccatgcgcgagctgttcctgcagatcgtctatggccgcactcagtccgctttctccgaggacggtctggctgtgggcgcgtctctggaggacttgggcaagggcctgcgctctcaggtgggcaccatgttcggcacccgcgaaaagggtccccgctatctggagatggccgagggctattgcagcaagctggctttgaacgacaaggatgagatcattggctacgagttcatcagcctgggcaagatgatggacgccgtgaagaagggtgtggatgccaacgaagccctgaagaacgccaccggccactacggccagtgggacaacgcggcgaagtatatcgacccgcgccaggaataagagaaggaggacgacaaaatggctctgtttgaaagttacgaaagacgtatcgataagatcaacggcgtcctcgcgcagtacggcatcggctccgtggaggagtgccgcgagctctgcaaggcgaagggcttcgacccctatgagatcgtcaagggcattcagcccatctgctttgagaacgcctgctgggcgtataccgtgggtgcggccatcgcgctgaagtccggtgtcaagaccgctgccgacgccgcacggaagatcggtgagggattgcagtccttctgcatcgacggttctgtggccgaggaccgcaaggtaggcttgggccacggcaatctgggcgccatgctgctgagcgatgagagcaagtgcttcgcgttcctggccggtcacgagtcctttgccgctgccgagggtgctatcggcatcgttcgcaacgcaaacaaggcacgtaaggaacctctgcgggtcatcctgaacggtttgggcaaggacgctgcgcagatcatcagccgcatcaacggcttcacttatgtgcagactcagtttgactatttcaccggcaagctgaacatcgtccgcgagattcgctattccgagaccgagcgcgccgatgtccgctgctatggcgccgatgatgtccgcgagggtgtggctatcatgcaccatgagggcgtggacgtgtccatcaccggcaactccaccaaccctactcgcttccagcaccctgtggccggcacctataagaaggagtgcatcgagcagggcaaaaagtacttctccgtggcctccggcggcggcaccggccgtacgctgcacccggacaatatggccgccggtcccgcttcctacggcatgaccgacaccatgggccgtatgcacagcgacgcgcagtttgccggctccagctccgtccctgcgcatgtggagatgatgggcttcctgggcatgggcaacaatcctatggtcggcgcgaccgtggccgtggctgttgcggtggcggaggctgtgaagtaatttcattttacacgcaaaacatcccccgacagactgtcgggggatgtttttatgtgtgtatatgcgtcagcacttgccgaaaaagccgcacagcagcttcagcagggaagcgcagtcgaaattgcagaacatagttgctgtacctccttgtggtatttgccttgcaagactgggtacattgtaaccgttttgtaaccattttgcaaatgtaaatactggaagtcacaggatcagcagtaggccgatggcgataagcagttcctcgtcggctttctgcctggagagatagaacagcaggaacaacagcagcagatcaccggcgtctaaatcgccgaggtgcagcttttccagcaggtcgttgaagaagctgcgctccggtgcaccgtgctccggtggcggcggaggaggacctttcggcggcggattggggcgcggcggcgcttcgtccacgggaacacgtgtatagacgccatcgtcgccgcgaatgtagcggttatacagggaaaccgcccccttccgaaagaaatcgcttgccaatggtgatgagccgcgccagccttgcggcgcgggcaaccttgtcctgtttatcgtccttcaggaaaggacgcagcgcgtagagaagttgggtggtttggctggtgtcgcgggtcagctcctgcagcagtggcaggtatttggcgatgacctggggatcaatggccggcagtggcgcaggtgatgggaccgcctgaggaggtgacggaggagatggcggtgtgttctcgccacccatggagccagagagctgctgcgccaactgcatgatctgcgccatgctgccggggtcggacagcagcgcgttgagtttttcgttgacgtcgtccacgctgtgtcctcctttccgttactgttgaagcttgttttccagacgctgcaccagctccgcgccctgtgggctggacagtacacgagagagcatggcgctcaaagctgccgtgtcaccggaggcagcctggcgcgctgcttgacccagtgcggcgctgttgccgccggagagcatattcagcagtgcttggccgtcctgtgactgcatgacagacttcaatgcacgggggtcgcttttcagcttgttgacaatatcctgttcattcatggaatgacctccttatagggttcgttacaggtatatcctatgtgcgcgggacgaaaaaagtgcctgtcagccttggctgacaggcataacgttttcattttacagggcgatacaggagcggagatagacgtgccccgcgtcctgctccgtctgcccaaggacgaagccgatacctgccttcgccttagatcgtatcgcggagcacctgatacatttttggcgtaccaacttggggtattgagcaatgcctggtgacagctggacaaaggcggctgtttatgcaggatgctttgcataaacagttggaaatacagttgtaaatcaggtacaaatgtgatacaataatgtgccaattaagattaggagtataggcgtttatgcctgcctgtataatacctgtatgatacctgtgtgataaaggacggagacagatttgattttagagacgatcaacagcccggcagacgtgaaatgtctgtccgaggagcagacggctacgctgtgccgggagctgcggtgctttctggtggagcaggtatcccgcaccggcgggcacctggcatccaacctgggtgtggtagagctgacggtggcgatccacagggtgttcgacacagccacggaccggctggtgctggatgtggggcaccaatgctacgtgcacaaggcactgaccggccgacgggagttgttcgatacgctgcggcagtttggcggactgtcaggctttcccaagccctatgagagtgtgcacgacgcctttatggcggggcacgcgtcggattcggtgtcggtagcgctgggcatggcacgggcgcggacgctgctggggcaggactaccatgtggtggccgttatcggcgacggtgcgctgggcggcgggctgagctttgaggggctcaacgacgccggcggcagcggcgaaccgctggtggtcattctgaacgataacggaatgtccatcgaccggaatgtaggcgggctgtccaagcagctgtcgaagatgcggacggacccggagtattacgaattcaagaagcgttaccgcaaggcactggagaagctgccggcgggccgaacactgtatgagtggagccacgaggtaaaaacagcgctgaaaaagacgctgctgccgccggtgagcaccgtgttcgaggatatgggctttgcgtacatgggtccggtgggcggccacgacgtacagcggctgacagcggtattgcaggcggccaaagaggccgggcgcccggtgctggtacacgtccacaccgtgaagggcagcggatacgactatgcactgcgggagccggagaagttccacggcgtagggccctttgatccggccaccggaaaggtacggcaggcaggcaaagaaacgttctcccatgtgttcggcgagacactgcggcagctggcgcgggaggacaggcgcgtgtgcgccatcaccgccgccatggccgacggcacaggtctgacaggctttgcacgggagttcccgcggcggttttttgacgtgggcattgcggagggccacggtgtggctatggccggcggtatggccaagcaggggctgataccggtgtttgccgtgtatgacagctttttgcagcggggctacgatatgctggtgcaggatatggcgctggagaagctccatgtggtgctggcggtggatcgctgcggcatcgtgggcgcagacggcgagacacaccacggctgtctggactacctgagccagataccgggcatgacggtgctcgcgcccgccagctttgccgagctgcggcagatgctgcggcgggcggtgctggagatggacggaccggtggcggtgcggtatccccggggcggcgaggacggctatgacggcgactgcggcgatgaatcagtgacggtgctccgtcaggggacagacgcggctatcgtgacctacggtatcctgacgcagcaggcgctgcgggcagcggcgctgctggcgggggagggcgtttccgcccgggtggtaaagctgaaccgggtcgcgccgctggacagcagcggtatttgccgggcgctggccggcgtaaagcgcatagtggccgcggaggatcagctccgcgccggcgcggtgggcgaacggctgggcgcgctgctgctggagcagggtgcgggcacggaaaagctggtactgcgaagcgtcggcacgacgctcccgagccaggggtccacggtagagctgcggcacgccctcggtctggacgcagagggaatcgcacaggcggtgcgggaggtattggcatgagcaaaaaaatacggctggatgtgcttgtgacagaacgcgggctgtgcgagagccgccagaaagcccaggccaccattatggcaggtttggtattcgtggacggacagcggtcggacaagcccgggacaccggtgacggaggacgccagtgtggaggtacggggtcacgccctgcggtatgtgagccggggcggactgaagctggaaaaggccatgcagacctttcccatcacattggagggcaaggtgtgcgcggacatcggcgcgtccaccggcgggtttacggattgtatgctgcaaaatggcgcggcaaaggtttatgctgtggatgtgggctacggacagctggattggaagctgcggagcgatgcacgggtggtgtgtctggaacggaccaacgcgcggtatctctccacggagcagataccggaggcgttggattttgcgtccatcgacgtgagctttatctcactgaagctgatctttccggcactatatacgctgctgtgcgagggcggtgaggtggcctgcctcatcaagccgcaatttgaagccgggcgggaaaaagtagggaaaaagggcgtcatccgtgacccggcagtacacctggaggtgctggagagcttcttgcgtcatgcaaaggaaaataactttacagttcttggtattacatattctcctatccgcgggccggagggaaatatcgagtacctcggctatctgaaaaagggcggggaagcggactgcgtccctgacctgcgggcgttggtggacgcctcacattctgcgttgaaggaaggtcatggggagatatgaaacgtgtgatcctttgcccaaatccctatcgggacagcgagctgaccgtggccaagcggtccagggagctgctggaggggctcggttttgaaacggtggtatgtctgcccttcagtcgggaggggtatgacgatcagctgggtgtgcccatccggcagttacagcaggagatcaagcgggcggatatgctcatcgccttcggcggcgacggtacgatcctgcatctggcccggacagtggcgctgcacaatgtgccggtgctgggcatcaatctggggagccttggctttatgtccgagctggagccaaatgagctggaacggctgcgtgacctgaaaagctgggattttgccgtggagtcccggatgatgctggacgtgaccgtgctgcgggagggtaagcccgtatacaacaatatcgcgctgaacgacgcggtgatctcaaagggcagtgtggcccgggtggtgcggctggatgtatccacggaggagggccggctgaccaggatcaccggcgatggggccattgtgtccacgcccaccggatccacggggtactctatggcggccggcgggcccatcgtggagcccacggctcacaatctgctgctgacgcccatctgcccccactcgacccgggcgggcagctacgtgctctcgccggagcacacgctgctggtggaaacggcagacgccaatcggaagttcgtatatctgtctgtggacggcgggaaggcgttttcgctgaaaaacggcgatgtggtgcggacacggcagtccaagttcgtgacgaagctggtgcggctgagtaaaaagagcttttgtgagatactggattcaaagatggggatggaggcgctgaagcatgaaaaatgaccggcagacagcggtattgcagatcattgaggagacagctgtggagacacaggagcagctgatgcagctgttggcggtacggggttttgcctgcacgcaggccactgtttcccgggacatcaagcagctgcacctgatgaaggcaccggacggcaagggtgggtatcgctatgccgtgtcggcgcagatgcccaagctgaattttgaggagaagctgcagacgatctttcgggagtgcgtcgtatcggcggaaaacgcccagaatttggcgatcatcaagacgatgaacggcatggccaacgccgccgcctttgcgctggacagcatgcaggatacggatatcgtgggtacgctggccggcgacgacacggtgctgctggtatttcacgacagtgcccacgcggcggatttctgcgaacaggtgcggcaaatgctgcgctgaggagggaagatcggtatgctggagctgctgcatattgagaatatcgctattatcgaggcggcggatatcgaattcgcaccggggttcaatgccctgaccggtgagaccggcgcgggcaagtccattgttatcgacagtctgagcgctgtactggggcagcggaccagccgggagctgatccgcaccggagccgaaaaggcgtttgtcagcgcggctttttccggcacggtaccagagctgacggagacgctgggcatccaaccggaggcggatgggacgctgctgctgcagcgggagatccagaccgacggtaaaaacgtatgtcgggtcaacggccgtccggtaacagtgggacagctgcgggcgctgggtgcccagctgctgaacattcatggacagcatgacgggcagcagctgctggacgaggagcagcacattgtgtatctggacagctttggcagggcgggaagccttataaatacatatgctgagaagtataagcactttacagatatacggcggcagatcggggcgctgcagatggatgaggcagaaaaagcccggcgggtggataccctgcaatatcagatcgaggagcttcgtcgggcaaaattgaagcccggagaagaagaggaattgacagcgcggcgggggatgcttcggaacgcggagaagttcctggacgcggtggccggggcggactatgccctgaacggcgacgacagcggcggcggggcgctgagcgccctgcggcaggcccaggacgcgctgggtggcgtacgccatttggatgacgctttcggccagctgtatgaacggttgggggaggcgtacagcgaggtctacgacatcgcggctaccgtggaggacaagcggggcgagctggatgtgtcgcccggtgagctggaccgggtggagagccggatggacctgctgtaccggctgaaaaagaagtacggcgcgaccgtggaggatatgctggactaccaggcccggtgcgaggcggagctggcgcagatcgaggatgccggtgacacgctggcgcggctggagcaggcgctgtccaaggcggagaaggaggcacggcaggcggcgcaggcgctgtccgacgcgcgaaaggcggcggcggaacagctgacgtcgcagatactcgccgagctgcagcagctggacatggggaagatacgctttgcggtggactttgcagaaaagcctctggacagcgacggcatggacacggtacggtttttgatgtctgccaacgtgggcgaggagctgcgtcccatccacaagatcgcctccggcggcgaattggcccggatcatgctggctatgaagaacgtgctcagtgagcaggatcacgtggggacgatggtgttcgacgaggtggacaccggcgtttccggccgggcggcccagaaggtggcggagaagatggcgcgtatcagccgcagaaagcaggtgctgtgcgtgacccatctgccgcagctggcggctatggcggacacgcacttctccgtagagaagggcgaaagaggcggccgtacctatacagaggtgcggcggctggacagagatcagcggcggcgggagctggcgcggctcaccggcggcagccatgtgtcccagaccatgctggacggggcagaggagctgctggtacaggcggagaaattccgggcggagctgtagctgtttttcgcaacatgaaaatagtggttgacaaacgaaaaaaatctgctacaataacctcaacttgatactgtaacagcgatgaagggaataagtagcgcatttcagacctgcaaagagagcctccggccggtgtaaggaggagaggaagaaatgggtgaatacatcccggagcagcctcccgaacgttcgcgtgagccagtagggatgtgtcgggtccgcccgttacagcggtagggtgtgtctgcacccaacgaggtcgtgtctgcgagggcatggcgaatatgaggtggtaccgcgagcgtctgcatcgccctctgtcgagatgacagggggcgttttttattccctgtcacaagaaaacaaatgaacatacagaaaggaaattgaagctatgggtatttatgaggaactggtggcccgcggtttgatcgcacaggtcacaaatgaagaagagatccgcgagatggtcaacaacggcaaggccacattctacatcggctttgactgtacggcggacagcctgcacgtgggccactttatggcgctgtgcctgatgaagcgtttgcagatggcgggcaacaagcccatcgccctgatcggcgacggtacgaccctgatcggcgacccctccggccgcaccgacatgcgtcagatgctgaccgaggacgccatcaagcacaacgcggagtgcttcaagcgccagatggagaagttcatcgacttctccgacggcaaggcgctgatgctgtacaactccgagtggctgaagcccctgaactacatcgagatgctgcgtgaggtgggcggctgcttctccgtgaacaacatgctgcgcgcccgctgctatgagcagcgtatggagcgtggtctgagcttcctggagttcaactacatgatcatgcagagctatgacttctactacatgttccagcactacggctgcaatatgcagtttggcggcgacgaccagtggagcaatatgctgggcggcaccgagctgatccgcaagaagctgggcaaggacgcccacgccatgaccatcaccctgctgatgaactccgagggcaacaagatgggcaagaccgccaagggcgctgtgtggctggaccccaacaagaccagccccttcgagttcttccagtactggcgcaacgtggatgacgccgacgtgctgaagtgcatccgtatgctgaccttcctgccgctggaggagatcgacaagatgtccacctgggagggctctcaactgaacgaggccaaggagatcctggcctacgagctgaccaagctggtgcacggcgaggaggaggccgagaaggccaaggccgcgtccaaggcgctgtttgccggcagcggcgacacggagcatatgcccactaccgagctgaccaacgatgatttcggcggcggcagcatcgacgtgctgaccctgctggtgaagtgcggtctggcggcctccaagggtgaggcgcgccggctggtgcagcagggcggcgtctccgtcaacgatgagaaggtggcggccattgagacgaccttcggctgcgaacagttcaccggcgacggcgtggtcatcaaaaagggcaaaaagatgttccacaaggctgttttggtgtaagctgtgcgctgcatctgtaattattgccatcgttttttggaaaagccgcggtatgaccgcggcttttccctatgcaaaggaacttttcccgggaaaaacgttgcataaaggcgggaaatatactataatatcccgcggtgtgcaaattttgaatgaatgagtgatacacgatgaaaacacacgatttttactttgacctgccgcaggagctgatcgcgcagacaccgttggaacggcgggacggctcacggctgttggtgctggacaagaaaacaggggcggtagagcaccggcatttttacgatctgccggagtatctgcgtccgggcgactgcctgatcctgaacaactcccgggtactgccggcgcgtctgctggggcaccgattgcccggcggcggagcctgcgaaattttgctgcttatcgaccggggcgacaacatctgggaatgtttggtgcggccggggaagaagcttcggaagggcgcacaggtcattttcggcagcggtgaattgacggcggaggtggtagacgagctgcccgacggcaaccggctggtaaagttctcttatgaaggcatctttctggaggtgctggagcggctgggtaagatgcccctgccgccgtacatcaaggaggagctgcaggatcaggagcgctatcagacggtgtactccaaggtcaacggctcggcggcggcgcccacagcggggctgcactttacgccggagcttctggaaaaagtacaggcaatgggtgtaaaggtaggatacgttacacttcatgtgggacttgggaccttccgcccggtgaaagaggacgagatcaccgaccacaccatgcacagtgaatactgtgtgatcccccaggagacggccgatcttattaacgagacgaagaaaaacggcgggcgtgtcatctgcgtgggtaccaccagctgccgcacgatagaatctcaggcagcggaggacggcaccatgcgcgccagcgccggatggacagatattttcatctatccggggtacaagttcaaggtgctggacgcactggtgacaaactttcatctgccggagtccacactcatcatgctggtatcggcattagcgggacgagagcacgtgctggctgcctatcagcaggcggtggaggaacggtaccgcttcttctcgtttggcgatgcgatgttcattcagtgaaagcaggagagagaaatgttcaaggttatcaaaaaagagggaaaagcccggcgaggtgtgtttacttgcgcccacggcggcgaggtgcagacgccggtattcatgaacgtaggcacccaggccgccatcaagggcggcgtcagcgctatcgacctgaaggaacggctggggacgcagatcgaactatccaacacctatcacctgcacctgcgccccggcgacgatgtggtgcggcaaatgggaggacttcataagttcatgcgctgggacggaccgatcctgaccgactccggcggcttccaggtattctcgctgtcggggctgcgaaagatcagtgaggagggtgtgacgtttgccagccaccttgacggacaccgcatcttcatgggtccggaggagagtatgcgtatccagagcaatctgggcagcgacatcgccatggcctttgacgaatgcgtggaaaaccccgcaccctatgactacgccaaggcctcctgcgaacggacgctgcggtggctggaacgctgcaagaaggagcacgaccggctgaacgctttgccggacacggtaaaccccggacagatgcttttcggcatcaaccagggcgccacctacgccgatctgcggatatggcatatgcagcagatcgccaagatcgactgcgacggctatgctatcggcggactggcggtgggtgagcctacggaggtgatgtatgagatcatcgacgcggtagagccgtatatgccggcggataagccgcggtatctcatgggcgtgggcacgcccagcaacatcattgagggcgtggcccggggcgtggacttcttcgactgtgtgatgccagcgcgcaacgcgcggcacggaaagctgtttacctggaagggcacgctgaacatcaaaaacgccaaatacaagctggatgaacagcctatcgaccctgaatgtgactgcccggtgtgccggcagttcagcagggcatatctccggcacctgtttacagcggaggagatgctggggatgcgcctggcggtgatgcacaacctgtatttttacaacaagctgacggagcgtatccgtgacagcctggacaacgggtgctttgacgcattccgggaggaatacagtaaaaaactggcggagaagatataaacctcttgccaaaagcaaaagaactatgtataatagtatcactttgttgttaaaggagtaatgttccatgattcagatcgcttacgctgatgctgccgctgccaccaccaccggcggcatgggttccaccattctgatgatcgtcctgatgatcgccatcttctacttcctgatgatccgccccgagaacaagcggaaaaagcaggccgaggagatgcggagttctctgaagaagggcgattggctgaccaccatcggcggcgtgtacggccgcgtcgtggctatcaccgaccgtactgtggtcatcgagaccagcgaggaccgcgttcgcgtggagttcctgaagtccgctatcggccaggtaggtaccctggacgagcaggctgccgcccagcagcgtccggtgaagaaggctaagaaggaagaggccgcggaggaaactcccgctgtggaggagaaggcctctgatgaggtcaccgaggctcccgctgaggctgacaaaaccgacgccgagtaatacagaccgagaggagcgctgcccggagggcggcgctctttttgcgctgacagcgatcgggatcggtgtatcatgtgatgcagaccttccgcataagctgaagcaaagctgatgcgggaggtattcttatgtcttggaagcaactggccggcaaaggaacgtggctgggcaccgccacagcggcagtcgtgctgctggcagcactgggcgtatcgtcactgctcctgctgcggggcatcgtgccggagcgcgcgatgggtccgctggtatggggcagcagcgttctggcgtgcttctgcggcggacgtatggccatacggcagggcggcgatggtccgctgcctcgggcgctggcagtatccgcctgcgtatatggtgcaatgtggatcgcggcgctgacaggaaacgaggcgatacattttaccggcagcggtattgcccagacctgcgccgtgtggggcggcggccttttggcgggactgatcggaacgaagcagaagcggaggagaccccacagcggtcacagaaagagcggtgaccgtcgaaaacgggcggtaacataaagcggcgcatggttaaaataacgaaaacgtgtttttgcggcattttttatccgacggtgcggcgggcggcaggggagtcgttcgccgcatcacgcttttcaagatatggtgcagggattttcggcatttccccggatattgggatttcggcatttttataaaccgtgtcagtaccccggtataccttgtttacataattaagttgacataacattttgacataatttacaaaaaatatgtttttgcggaaaacctcttgcggttttgtgaattttgccatatatttattattacgttttggcacgtctatcgagagggcttggctcatacactgtggacgaggtgagccctatgaagctgcgtcgacgccgtatgcctgttctccagccgccgaaggcgcggctgtacatactgtgcctgtttcttgccgccgggatcctggcgggctttttagcgggtcggactgtggcatcggaggaccttctgtcgttgagccgctatgtgacaggctatgcgaggctgaatgcagaagaaccgcgcagcgcggggctgtggcaggtcctatggacctatctgcgctatccggccgcggcgtttctgctgggctgtacagcctggggcgtgatgctgatcccgctgacgtgcgcggcccagggcttcttcctgtcgttcgcggtgcagtgctttgccgctgcactgggaaagcagggcgtggtattggcgctggcggcgctgggactgcggtgtctgttcaccataccatgtctgctgacgatagcggcggacagctttgcgtgtgcgtggcgccgggcagaacgtcaaaagccggaggtgagagaccggcggagcgtgatcatctgtgtgtttgtattgctgaccgggacagtggcggagtgcgccctggtgccgcggctttttgcatggctgatgccaggcttgacttgaaagagagaggagtgagggacacatgacggactttatcgcggcataccgcgactatctgactgaggagaagcacgcctccgccaataccctcagctcctatatacgtgacctgacccagtttcacagctggctgctttccgtgggcgtaacggatatgcggaaggtgaagaaagagacgatcaatgagtatctgctgcatatgacccacagcggcaaaagccccgccacagtcacgcggtccacagcgtcgatcaagtcattttatgcctatatgatgcagtgcggcgctgtgaagagcaacccggccaagagcgtggtggccatgaaggtggagaggaagtatccggagatcctctccaaccgggaggtagagctgtttttggagcagcccaaatgcgtggacgaaaaaggcttccgtgaccacgccatgctggagctgctgtatgccaccggaattcgagtcagtgagctgatcggtctggatgtcagcgatgtcaatttgtccgccggctttatccgctgccgcagcaagggaaaggagcgcatcgtgccgctgtacaccgctgcggtgaaggctctggaggactatgtgcgggatattcgtccccggctcatcgccgatgaggaagagcatgcgctgtttgtgaatatgagcggcgaacgcatgagtcgccagggcttttggaagatcatcaagtactatcaggaaaaagcgggcatcgagaaggatatcaccccccacaccctgcgccattcctttgccgtacacctgctggaaaacggcgccgatctgcgatccattcaggagatgctgggtcacgcggatatcagctccacgcagatatatacacacgttatcaaaaagcagctgaaggatgtatataataaggcccatccccgtgcataacagcctatcaaaccgcccggttttccgggcggtttttgttgctatttttattccagtttgctataatagaacaaatgttgggaggtgggcgcagctatgcggatactgggcatcgaccccggcatcgccattgtgggcttcgggctgatcgaatcgaaccggggcagtgtgcgaatgctgcaatacggcgctgtgactaccgaggcgggactgccgctggcgacacgtctggtgcagatcgaaaacgacatgaccgcgctgatcgcccaactgaagcctgatgagatcgccgttgaggagctgtttttcagcaaaaacatcaccacaggtatcgccgtggcccacgggcggggtgtgatcctgtgtacggcggagcgactgggcgtacccatattcgaatatacccccatgcaggtgaagcaggcggtggccggctacggcctggcggacaagaagcaggtgatggacatgacaaagcggcttttgaagctgaagacagtgccgaagccggacgacgcggcagacgcgctggccatcgccatatgccatgcccgcagcgctaccagcctgctgcggcgtaaggaccccgacgtgaaggagactgtctgatatgtattattatgtgaacggcaccgtggcggagatcgatgcggggctggcggtcatcgactgcagcggcgtgggctacgcctgtgccacgacgaactatacgctctcccagctgaaaaagggcgcaccggccaagttgtacacttatctgaatgtacgcgaggacgccatggagctgttcggcttcgccgatcagagtgagctgcggagcttcaagctgctgatcggcgtatccggcgtaggccccagggcggcgttgtctatcctgtccgccgtaacaccgcagcagctggcgctggcggtggtgacagaggatgaaaaagcactgactgctgccaacggcatcggcaaaaagattgctcagcgggtgatactggaactgaaggacaagctggcacgggaggaagcgctgggcggcacatccgttaagggcggtgcgcccgcgatggctgcggtgccccacagcaagaaaagtgaggcgcagtcggcattggcggtgctgggctacggcagcgcggagatcgccgcagcactgaaagatatcgacatggaagcgctgacgctggagaacatcatccggcaggcgctgaagcgcatgatgaagtagaggaggggcgcacatgagcattgatttcggggcggacctgtacgaggagcctatcgtcgccaaaacgtttctcagtgaggatgccaacgaaggttctctacggccccacacactggcggaatacattgggcaggagaaggccaagcaaaacctgtcgatcttcattgaggcggcgcggcggcggacagagtctctggaccatgtgctgctgcacggccctccgggactgggcaagaccacactggcgggcatcatcgcccaggagatgggcgtgaatatccgcatcacctccggaccggctatcgagaagcccggggacctggcggcgctgctgacgaacctgagtgagaacgatatcctgttcgtggatgagatacaccggctgaaccgggcggtggaggagatcctgtacccggccatggaggactacgccatcgatatcatcatcggcaagggaccttctgccaactctatccggctggatctgccgaaattcacactgatcggcgccacaacacgggcagggtcgctgtctgcaccgctacgggaccgctttggcgtgacgctgcggctggagctctacacgcctgaggagctggcaaaaatcgtgacgcgcagcgccggcatcctgaacgtgtctattgaaccggagggcgctatggagatcgcgcggcggtcccggggcacgccccgtatcgccaaccggatgctgcggcgggtacgggacttcgcccaggtgatggccgacggcgttatcaccaagtccgtagcggacaaggcgctgctggcgctggaggtagactatctgggtctggacaacgtagatcgacggatgctgcaggccattattgaaaactatggcggcggcccggtaggtctggacacgctggcggccaccatcggcgaggagtcggtgacgctggaggatgtgtatgagccatacctgatgcagatcggctttttgacccgaacgccccgagggcgctgcgtcacgcagaaggcctatgcacatctgcacattgcgtttacgggccagcagcagctggaattgtagtgcgcagagacggttcgatggaatttttcggttgttctccgcaagaaagccgtcaaatttgagttatttttgacaaagttacacgattgacttgacaaattattttgtaaaaaggtataatagcgtatggtgaatgatacaagggctgaatatgaccatctgcagacgctgagcgacgaggcgctgtgcgctctggtaaagcagggcagccgcgacgccgaggagatcctagtagggcgttaccaccgtttggtgcgctcctgcgcccgtccgtactttctggcgggaggggatagcgaggaccttttgcaggagggaatgttcgggcttatcaaggcaatacgggagtacgagccaggacacgaggcctctctgtgcacttttgccgagacctgcattcgtcggcggctgtattctgtgctgcgtgctgccgcctccgggaagcattcacctctgaaccaagccgttcctttggatacctctttctttgacgcgaatctctcctttgcccacgtcgatcccgagggttgggtcatcgactgcgaaaaaactgccgctctgctggaaaacgcgcgcaagctgctgtccgaattcgaggtaaagattttagggtattatctggacggtctcacctgccgtgagatcgcagaaactgtgggccggtccccgaaatcggtggacaacgccgtgcagcgtttgcgccgcaaaatagcgcggcagcttctatccggcgatatcagcaaaggctgagcgcaatatattttttctcaaagagagggtaaaatcatgtacgaagacaagaccttagtgtgcaaagagtgcggcaacgagttcgttttcaccgccggtgagcaggagttctacgctgagcgcggcttccagaacgagccccagcgctgcaaggcctgccgtgacgcgcgcaagaacgctgcccgtggtccccgcgagtatttcaccgctgtctgcgctgcctgcggcggcgaggccaaggtgcccttcgagcccaagagcgatcgtcctgtgtactgcagcgactgcttcgccaagatgcgtgagaacggctgatctgctgactgcacactgttaagtagatagaatagaccgccttccggtatgccggagggcggttttttatagcgcaggatgagaaaaatcctgttgaaagttccggcattttggggtatactatcagcacaatattgtatttggaggttttccaacatgatcgagatcacgaaagacaccattatcggtgatattttggacgttgcgccccagaccgcgcccatcttcctgtccattggtatgcactgcctgggctgcccgtcctcccgcggcgagacggtggaggaggcctgcgccgttcacggcatcgatgtggataagctgctggagctggtgaacgaggaagccaacaagcccatcgccgagtaaacaaaaaaacaaagccacgcatacgcaagcgtatgcgtggccatttgtgtagggaaatatggagagacgactgcaattacaaccgcggctccaactgctggcggacatgacaccggcgggctgccgtctggcggatatcggcacggaccacgggtatctgccggtgtggctgctgcaaagggagcgtatccaaagcgctattgctgcggacatcggcgcagagcctctggcgcacgcgcggcggactgcggaggaatatggcgtggagggtatcagcttccgcctgtgtgacgggctggctaatatctctccggaggaaacggatacagtgatcatcgccggcatgggcggagagaccatcatcgccatcctggaaagtgcgccatggacgaaggacggtgcgcatacgctgctgcttcaacccatgacaaaggccgcagagctgcgccgatggctatctgtaaatgggtacacctttacagatgagcggctggtgtgggacaagaattacctgtatccggtgctgcgcgtgaacggcggcatttgtccggcgctgactgaattacagacgctgaccggtgttctgctggacggcgacccgctgtatgcggactatctcacccagcacatcgaaaagatgcttcatatcgcggaaggtctgcgccgcagcggcagagaggacgctctgcgtcgggcggaggccgcggaagcattggcacagcagatagaagaaaagaggaaaaccctatgacaacggtacgggatatcgaacagtatctgtacgcctgggcaccgcgggaattggcggagagctgggacaatgtgggtctgctggtgggtgacccggaagcggaggtgcgccgcgttctggtcgcgctggacgtaacgccgcaggtggtggacgaggccattgaaaaagactgccagctgatcgcggcacaccatccggtgatgaactgtgcgtggcaccaggtgcagaccgtccgcaccgatgaccggcagggaagggtactgacagagctgatacgccacggcatcgccgccatctgtatgcacaccaatctggacgcggcggccggtggcgtcaatgaggttttggcgcagaagctgggcctttccgacctgaaaatgctgacggaggaaaaaatagggcggatcggcacgttaaaatgtgaaataccccttgtggagttcacccattctgtgatagaattattgaaatgcaatggtttgcgctatgtggacgcgggacggccggtacaccgggtggcggtgggcggcggcgcctgcggctgctatattccgcaggctattgccgcaggctgcgacacctttgtgacctccgacctgaaatataacgactttttggacacggaggggctaaatttgatcgatgcgggtcattttcccacggagaacgtggtatgtcccgcactgcgagaccggttggcagaggcattccccgcagtcgacgtcttatgttcgacctcgcacagccgcgagatcatccaatactgcataaaggagaagtaaaccatgtcaggacattccaagtggcacaatattcagaagaccaagggggcggccgacgccaagcgcagcgccgcattcaccaagatcgccaaggagatcatcgtggccgtcaagcagggcggcagcggcgaccccaacaacaactcccgcctggccactgttatcgccaaggccaaggcagccaatatgcccaatgacaacatcaagcgcaccatcgacaaggcactgggttccggcaataccgataactatgaatctgtcacctacgagggctatggcccctgcggcgttgctgtcatcgtggaggcgctgaccgacaaccgtcagcgcactgcacccgagatccgccattattttgacaaattcggcaagggcatgggtgctcagggctgcgtcagctggtcctttgaccgtaagggtgtgatcgtcatcgacaacgaagagggcgagctggacgaggataccgtgatgatggacgcgctggatgccggcgccgaggatatgcaggccgacggccccgtgtttgagatcaccaccgatccggacagcttcaacgacgtggtcaaggcgctggaggagaagggctattccttcgagagtgcggagatcgagatggttccccagaactacattgtcatgaccagtgaggacgatgtccgcagcatgacgaagcttctggatatgctggacgacaatgaggacgtgcagaacgtctggcataactggcagcaggattgattggagaacatacgaaaggcggcctcgcggccgcctttatctatggggagagtgattatttgacaatagaacggatcgagcgtgatggaaaagcgtgtgccgcgatacgcggcacagaaaaggtcatcatcgatgcacagtctgcgatggaactgtataaaagagacagggcagacgccctgtctctttgcatatatcacagtgtccggacgccgtccatgatgatggcgccggccagggcggccatctcttccggcgtctcctttgcaccgccggagagccactccagtgtcagcgtcagattgccggagacaatgaaggaacagaaatagtccagacggtcgctgctcccggaatagaaccgggccaggaagtcacgcaggaaataactgcgtaggattccgcagatacgctcggtatacgcccgatcgccgttgggccccagcagcaccaaacacaaatcggcgttgtcctgggcgaagcgatacagctccgtcaggtagggaaacgcatcgacttcgccggtggagtaggcgtatttcttacagaccaggatcaaacgctcggccatttcgtcctccagccgctgcagaagatcgctgacgtccttatagtggatatagaaggtcccgcggttgatgtcggcacgctcagccaactcgcggacggagatggatttggagggcttctcagacatgagatccatcagtgcctgccgcagctgccgctttgtctttctgacgcgccggtcaatacctctctcttccataccaataccctccgcactctttttgatctgccgaatagttgaccttgtgttgattttagcacaaaaaggcagaaagaacaaggcttttttacaaaaccgccttactcttgtggaagatcaggcacttctaaaccacggagacagcgcatagaaataaggcaacagacagcattcggaggatggcattatgatggagacaacgtctatttatcaggatatggctcagcgaaccggcggcagcgtgtatatcggcgttgtgggaccggtccgcacgggaaaatccacctttgtcaaacgatttatggagacgctggtgctgccgcacatcgaaaacagctaccggcgtgacagggcacaggacgaactgccgcaaagcggctccgggcgcaccattatgacggcggagccgaaattcgttccggaggaggccgtggagctccggctggcggagggcgcggccttctcggtacggctggtagactgcgtggggtatatggtggactccgccgtagggcagtttgaggacctgtcgccgcggatggtgatgacaccctggttcgatcatgagatccccatgaccgaagcggcggagatcggtacccgcaaggtcattaccgaccatgccacagtgggtatcgtggtgaccaccgacggcacgatcacggatattcctcgagaggactaccgcgaggcggaggaacgcgtcatacgagaattgcaggacatcggcaagcccttcgtggtgctggtaaattctgcccagccggaggaccccagggcagctgctgccgcagcggaaatacagacacggtacggcgtgacctgccgctgtgtcaactgcctgacactgacggaggaagacatcggcgatatcctgcaggatctgctgtatcagttccctttacgggagctggatgtttttcttcccgaatgggtagatgcgctgccgggtgaacaccccatccgcagcggactgtaccaggagatcggcgaggctgcgtcccagctgacacgtatctgtgcactgccgccatgcttggcagcgctgtcccaaggcgaaaatattgagagtgcggcagccagcactattgatctgggaaacggcgtggcacaggtggaaatacggctgccgcggcgtttgttctttgaaacgctgagccagcgcagcggcttgcaggtgaccgatgacggcgacctgatgcagatcatcggtgagctggcggaggccaagcgggaatacgacaaggtggcgccggcccttcgatccgccagggagactggttatggcatcgtaatgcccggcgtggaggagctgaacctggaggacccggagatcgtgcggcagggaggacgctacggcgtgcggatgcgagccagcgcgccgtctatccatctgatccgtgcggatatcgagacgacggtttcccccatcgtaggcaacgagaagcagtcagaggacatggtaaactatctgctgcaggaattcgagggcgatacgggaaagctgtggcagtccaacatcttcggccgcagcttccatgagatcgtaggagaggacctgcaggcaaagctgaagcgtatgccggcagacgctcaggcaaagctgcgccaggcgctggaacgcataatcaacgagggcggcggcggacttatctgcattattctgtgacaccggatatattctccataacagagcagccgggcaaacgcctggttgctctgtttaaggcggtatatcgtaagaagctgcacgtttacaaggtttgaaacgtatggaacatttggttttgatttcattgttttttgaatttttcggtagaaaaacaggtgtaaaacctcaattattgtgaaatattttttacttttatagtgacaaatttatgtaagctggtataatgtacttggaacaaatacggccgccccgggcggtggaacaaaggaaggacaatcacatgggaatcaagatcggtatcaatggcttcggccgtatcggacgggtggtgctgcgtatacttgcagacgacccggagcgcttcgaggtatgcggtatcaacctgcggaaggcggacgtggactacatggtctatctgctgaaatatgattctgtgttccggaatttccccggaattgtggagcacgccggcggtgacctgatcgtcaacggccgcaagatcaaggtatacagcgagtccgatgccgccatgatcaactgggcagactgcggcgcggagtacatcatcgagtccaccggcgccaacaacaccaccgataaggcctcccgccatttcaagggcggcgccaagaaggtcatcctgacggcccccgccaaggacgatgccacgcctacctttgtcttcggcgtcaacagcgatgaataccgcagcgatatgcgcgtcatctccaacgccagctgtaccaccaactgcctcgcgccgctggcctatgtcatccacaaggagttcggtatcgagcagtccctgatgtccaccatccacgcatccaccgccaagcagaaggccgtggactctcgcggcggcagtgactggcgtacaggccgttccatcctcaacaacatcatcccgactaccaccggcgcggccaaggccgtgggtcgcgtgatcccctccctgaagggcaaaatgaccggcatggccttccgcgtacccaccgcagacgtatccgtggtggacctgacggcgcggctcagcaagacggcgtcctacgcggacatctgctacgaggtcaagcacgcctccgagacgtatatgaaggatattatcggctatacccgcgaccaggtggtatccaccgacctgatcggcaatccctgcccctgcatttttgacgagacagcgggtatttctctggatcaggacttcgtgaagctcatcgcctggtatgacaacgagtggggttacagcaacatggtggtgcgtatgctggagcatatgcacactgtggacgaagcggacgcctttgtggcgcaggaataagcggcatatatacgatctcccccggccctgccgggggagatttcttgcgtccgtacccttgtcaagcggttcgccgcgtggtatgatagcaccagtaggaaaggtggatagggaggaggacatatatgcttttggccatcgatatcggcaattccaatatttccgtagggctgtttgaccgggagaaaacgctgaaatttctggcatctatagacacggacagccgcaagacagcagaccagatcagcattgatctgatgaatttgtttacactgtacggctgtgatatccacgatgtcagcggggcgatcttatccagcgtggtaccgcctatgaacttcatgatggaaaaggcgctgacgcgccttctgggcaagccgcccatggtggtgggcgcaggcatcaagaccgggctgaacatccgcatggaattcaacagccagcagctgggcgcggacattgtggctaacgcggtatcggcattggaaaaatacccggtgcccatcatcatgatcgacatgggcacagccaccatcatctcctacatctcagagaagcgcacctacgagggcggactgatgttccccggcgtgcggctgtcgctggatgcgctgtcccatcatacggcgcagctgcccaatatctcgctggagcacccccggcagctcatcggcaaaaacaccgaggactgtatgcgaagcggcatcgtctacggcaccgccgccatgctggatggggtcatcgaccgtatccgtgagacgctgggcggggcggagccctctatcgtggccaccggcccaaacgcaccggtgatcgcccgatactgccgcaaccacgtggtgtacgacaaatatctgctgatggagggactgtacgccatctatcagaaaaatgcaaaatgacatacgcgccctccggcgataccggagggcgtacctttatgtaaaaacagctggaaagcaaaaatactttccagctgtttatgtataacgtttttacttagcaagcacctttttcagcttgacaaagcggggcagagagtcctgcttgggcagctccggctcaccctggatcagcggcagcgcatactcgatgaactggtggttcacgccattgccctcctcattgatccactcgcggggaattttcttctccacgttggcgacctccaccagcggaacgagcttggtgcggcaggcatacttcccgttctggataccgcgctcaaagccgatcatgcggccgttgatgccgttgaccgcgttctccacggccaccttgccggccatgtaggactcttcgatatccgtctcgctggccagatgggcggcgcagcgctgaagcaggttcagctcgatgcctcggaccttggcgccggtctcctccttcagcacttcggccagaatagtggccagaccacccagttgggcgtggccgaagccgtcgttggcggccaccttggcctcggagacgaaaccgccgtcctcatagtggataccctcggacacggccacaatacagttgcccgtggcattgtagaccttcttgacgtcctcgatgaatttgggcatactgaaatccgtctcaggcagatagatcagatccggacccgcgccatattcgctggccagggcggaagctgcggccagccaaccggcgtgacggcccatgatctccaccaccacgatcattcccttgtcgtacacgtgtgcgtcctgatagacctccataatggaggtagcgatgtacttggcggcagaggcatagccggggcaatgatccgtgccgaacagatcgttgtcaatggtcttgggcacgcccataacgcggcactcgtagcccacagactgcatatactggttgatcttattgcaggtgtccatggagtcgttgccgccgttatagaagaaatagcgtacatcgtgcttcttgaagacctcaaggatacgcttgtagtccgtatcatctagctccggatcggcgatcttatagcggcaggagcccagtgcggaggagggggtatacttcagcaggcgcagctcctcgggatcctcctgccccatgtcgaacagccgatcgttaagtacacccatgatgccgtgttcggcacccagcacctgggtaatggcgccggacttcagcgccgtgtcgatcacgccgtaggcactggcattgataacggaagtggggccgccggattgaccgataatacacgcgccgcgcagttctttcatattcgcatacctccaaaagcggaatttttgtgtttacaacgggtattttaccatgtagaatagccgttgtaaacagtttgtgcttgcaaatccgtaaaaatatgatacaataggaacgttccatacaacaggtgcatacttgcaaaatttatcataaaggagactttgacatggcactggtaacttccaaggaaatgttcgccaaggcttatgatggcggctacgccatcggcgcgttcaacgtcaacaacatggagatcgtacagggcatcaccgaggcctgccaggaggagcacgctcccgtgatcctgcaggtcagcaagggcgcccgcgcctacgccaaccacacctatctggtgaagctggtggaggcggcggtagcgacctgccccgatatccccatcgtgctgcatctggatcacggccccgactttgagacctgcaagagctgcatcgacggcggcttcacctccgtgatgatcgacgcctcctccaagcccttcgccgagaacatcgagatcacccgcaaggtggtggagtacgcccatgaccacggtgtcgtcgtggaagcggagctgggtacgctggccggtatcgaggatgacgtgaaggtggctgaccacgccgcgtcctacacccgtcccgaggaggtggaggagttcgtatccaagactggctgcgactccctggctatcgccatcggcaccagccacggtgcgtataagttcaagcccgagcagtgcaccgtcaatgagaagggcatcctggtgccgcctcccctgcgcttcgacgtgctggaggaggtcagcaagcgcctgcccggcttccccatcgtgctgcacggctcatcctccgtgccgcaggagtatgtgaagatgatcaacgaccacggcggcaagatgcccaacgccatcggtgtgcccgaggagcagctgcgtcaggccgcccgtctgtccgtctgcaagatcaacatcgactccgatctgcgtctggccatgaccggcaccatccggcagttcatggacgagcaccccgacaagttcgatccccgcgagtatctgaagcccgcccgcgccaacatcaaggagctggtacgccacaaactggtggacgtgctgggctgcgctggcaaggcgtaaacgactgtacaaaaaatctcccggctccgcagagccgggggattttttcagttgtatgcgctgtcaagaaagcaccatattgttatacgacctctaccacgcgccaatagccgtcaccgtatttttccagtttccagagtacgatatggtctattgcgcccgtaccggtgcatgtgctgaggtcatctgtcttatcaaagcgctggtatccgtatttgacccacattttcccggaatctccgctgaaatgtgccgacagcaggtcgatgtgatagatggtcagcattttgccggcgtccatctccggaacgcagtaacgtaccagcgcgcccatggcataggcagcctcgtccctcggcatcgccagaacattgttgtatatttcctcctctgaatactcaaatacgatgtgtgcgttgctcagaacagcctctgccttgtcctggtcggaataatctcccttgaacagcagcgccatgcggtcgctgaaggtatactgttcggcagagctgatggccgccagatagtcgatggagttgatccgcagcatcagcgtcaccagcagcaccaccgtcgcggtgatggcgatggcgcaccaggtctgcttccgcagcttctttttcagcgtccgcagaacgccggcttcaccggtgcgttgctccgtgtccgcgtcagtgggagcggacggctcttcaccggcggacagtgcgcggcattctttgcatgtatccagatgctctttgacaaaggcggcgctgtcctcgctgagcatgccctccgcatacagcggcagcaggtcgcggacgatactgcattcatttttcattgttgctgtcctccaatctgttttttatcatgtttctggcacggtggtaggtgacgcatacccagttatccgacttggcgaacaattcaccgatctgcttataagacagctcggcgtatacccgccacatgaacacctcccggtacggctccggcaggtcatgcagaatagcctgtatctgccgggcttcctcccgtgcgccgatcagctcctcgggggtatccgcactgcccacagactccggcagttcttccagcggagtggtatgcttttccttccgcagataggtataatagcagttcttggcgatctggcacagccatacccgcatgtcgcagctgccccggaattttccgatggatcgcagtgccttgaagaatgtgtcgctggtgatctcctcagccacatgctcgctgccggatagcttcagaatatagcggtatacatcccggaagtacaggtcatagacctgctcaaattccatctgctgccacctcctttgtctatatgacgcgcggctcggcggaatcttacaaattatttcgattattttggacagcgaaagcggcggcgcggatgatatccgtgccgccgctgataacaacagctgtaaattatatctactttacagtgtctctttgattttgaccgcgatctgatcggcggtcaggccgtattcccgcagcacgtcggcagccttgccggactgaccgaaccggtcgttgacgccgatcttgcggaatttgcagcagaccttgcccatcagtacatcggccacagcgtcacccagacctccgatgacgctgtgctcctccacggtaatgacattgccgcacttttcggcgtacttcgtcacgcactccgcgtcaatgggcttgatggtgtgtacgttgatgacgctgatctcgataccctcggcggagagcagcttggcggcctccagcgcctcgttgaccatcagaccgcaggcgaacaccgccgcgtccttgccctcgcgcagcacattggccttgccgatctcaaagggatagtcctcctcgaataccggggtggccaaacgcgccagacgcatataggcgggaccctgaaactccgccagggcaaaggtggccttctttgcctcattggcgtcagcagggacgatgacggtcatgccggggatcagccgcataagaccgatgtcctcgatggcctggtggctgccgccgtcctcgcccacagacacgccggcatgggagcagcatatcttcacattaaatctgggataggcgatggtgttgcggatctgctcataggcgcgcccagcgccgaacatggcgaaggtggagcagaaggggacaagccccatagtggacaaaccggcgccgatattcatcatattggcctcggcgatgccgcagtcaaagaagcgctcgggatgcgccgccttgaaatacttggtcatagtggcaccagccaggtcggcatccagcactacgacgttcttattctgttcacccagctctaccagcgccttgccgtaggcttcacgggtggcgatcttttcactcatggctcagtcctccaattccttcaatgcctgctgccgctgttcctcgttgggcgccttgccgtgccagcccacctggccttccatgaaggatacgcccttacccttgaccgtgtgggccaagatagccttgggcctgccaggcgtcacaggcgcgcccagcgctgcttcaatggcgtccaggtcatggccgtcgatctcgtgcagatcaaagccaaaggcccgcagcttggcgggcatatcgcccagggacatgacctcgtcgttgctgccgtcgatctgcaggccattgttgtccacgatcacggtcaggttgtccagcttatagtgggcagcggacatgagggcctcccagatctggccctcctgacactcgccgtcgcccagcagcgtaaacaccttggtgtccttgccctgcaccttggcgcccagcgccatacccacggcaatagagcagccctgacccagggagccggtggaggcgtccacaccagggaccttcttgcagtccgggtggccctgcaggatgctgtgcagctgccggaagttcttgaactcatcgcggctgataaagcccaactctgccagaaccgcgtagtaacagggggcagcgtggcccttgctgagcacaaaacggtcacggtccacccaatgcggatttttggggtcgatacgcatatggttatagaatacgctggccaccagctccaccgcggacagggagccgccgggatgaccgctgccggcgttggcggtcatgttgatgatgtcacggcgcatctgacggcacacgccggacaattctgctttattcatgggaaacctccattccatgttcttctgacctaataggatatagtatttcccatataaagtcaatgcaggacaacagaaaagtcacagaaaagtaacggaaaatatcacatcagcaggggagggcacatacaatagggcggagggatgccagatgctttttcgtccgtatgacagactggaggccgtgatctacgcccatcgctgggcctatggccgcaatccggccttttacgattatgaggagatcggcggcgactgcaccaactatgcctcacagtgcatctacgtcggcaccggtgtaatgaactatacacctaccttcggctggtactacatcaacagcaatgacaaatccccctcctggacgggtgttgagtttctgcgtgactttctggtgcgcgaggaacgctctgccgggccggtagcccaggagacgcaggacctctcccgggcacggcttggagatgtgatacagctaaggttcagtggggatgtattccagcattctccggtggtggtacagcccaactctgacggtgatccggccaaaatactggtagccgcccacagcgcggatgtggattggcggccgctgagtacctacgactatcaggcgtaccgggtcctgcacatacttggtgcattcgtgccgtaaatgaacatcccccggggaaacctggggatgtcgtacaataagctgtccccggcagagccggggacagcttattattgcggcactatttatcaaaggatgggttcataaaatatacgttcttttcgttcagccggtctttggccaagcgcagaccttcgccgaagcgtacaagatggagtaactgtacttgcttaaatgcgccattcgatcttgatggactcgctggtcgcatagatgacacggatgagctggtctaccgtctgtcgcttatcatcgaagctcaactcgtcccacatagtcaggtgattatagatctccgtatagtccgcttccttgtgcagcttcaattcagagatacgcttcatcagctcttgctttttcccatccagttctttgacgcgcccactgatgtagcgaaacagggtatcgtccgcagccgacaggcgatccatcagcgagccaatctcagtctcaacttgcgtaagttgaacattcaacgccgttagctcggggttaacgtaatttcctttacaccttctgagcgttttgaactgagccatctttttgcgcatttcattgtagatgatttgctcaaactcgtcggtataaatcgttccgggacccttgcaggctttggagttcattttgttcgaacagaggagatagcgggagcgtgtggtcgagtagtgcttatccaccaaagcgtacccgcagatgccgcatttgatctttcccgccagccatgtgttcttggctttctgatatggcttgatctgctgcgcttccagacactttgcacggcatttcagccataggtcggagggaatgatgccctcgtgtggcgccagcaccaaatggttgccttctaaattcatttgcttgcgtcctacggagtcctgtcccttgtagtagtagcatccgttcgtgccgataaagtcactcggatcgtttgccatgatcgcgccttggtcacgatagaactcatagacggatagatccgcgcggacatagatgggattcctgagaacatccgcaagtcgtgtgcgtccccacggctttccgtttttgagaatgccgtgggcttgaaagtagcggataatgtcaccgtaggagcattccggcttggagtagagctcatagatcaaccgcacctgttccgcttcctccgcgttgatctcatacatagaggtcttaataccctcgatggtcgtcgggatcagccggaatccatacggaactctgccgcccatatagaagctcttttgactgcgggagtagtaggcatccgccacgcgcttttgaatagtttcccgttccaactgcgcgaatacaatgcagatgttgagcatggcgcgtcccatgggcgaggaagtgtcgaatttttctgtcgtggatacgaactcgaccctgtgctttccgaatttctccatcatattagagaagtcgaggatagaacggctgatgcggtccagcttgtaaacaacgaccttaccaatcactccgttttcgatgtcgttcatcatttccgcaaaggcgggacggtctgtatttttaccgctgtaacctctgtcggtataaaccttatactgttcacctctcatttcgtactggcagaactcgatctggctttcgatagaaatgctatcggctctgtcaacggattgtcttgcgtagattgcgttcattttgtagctccttcctcacagaaaagagctgctgacaggtacatcataccgcagcagctcctaaatagctatcattttcattgtgtttttcatactttataaagacctcgaaaagaccttcctcgatacatcgccgctgttccatgcactcctcggcggtaagctgtggggtaaggttttcaattctgatcatattttttctgccggaaataatgtgcgcatcactatcgtaagtgaaagggcggacaataataactatcacctcccgcggtgctatcattttatttgcgagaaccttgtcctatgcagaaagggagagtcgaaatccttcaactctccctttgcgtcacatggtctgctgccagtcataactcacctcgtcctcgtggtcatcagccttgtgaccgagggcgattttcttttcccgttctttttgcaatgcctttctgtcggtgtagtgctgtacgggcatcacaggggcagtaggctggagctgctccagacggtgcccaagccccaccagagcagaagcagtgctgccgccgccattagcagagagatcaatgccggaataccgacttgtggtagatgcagtctgggaagtctgattctgcgcagagaaaaagagttctctttcggcttcccagcctgttcgctcatctgctccagatggcgtaccgtcttcagaagatcgtccagctgcgtccgcgtgggaagctgcgacatctgcctgctgatgctctccaacagatccgtctgccgatccgcatggtaccacagtgtatccagatcgttcatcatttgctcccagtccgcttttgagggacgcgcttcgggaggtggtgcctgcaccggcagcgctgtctgctgggagttgcgctgcttgagttcttgcagagacaacctctgcccgtattctgaattcatgctccatggcctccttgcaatacttttcctcgtgtaatttgttgtcgcggcacttcgtgccgtccggcgtggtgtaggtgatgtacttgcggctgctctcccagcggacggcgtagccctcggacaccatcagggaaacgaaggcgtccttgtcggcggcgtatttcatacactcgtcgatggtgttcatgagccgcagcttccagctttgacccttcaacgccgtgtggtactccgcgccgcccatgccgcgggcctgttgcgttggcgcatcaaagacaggaagacccatctccagacagatcgcatcgttgcgccgcatcagctcttggatctgcgctttcgccatgtgcagctttttgccggtctcaaagttgacagagttgatgacgcagtgggagtggatgtgctcccggtctacatgggtgcagaccagcacctcgcagccgtcgaagtattctgccagccgccgcgcggcttcgtgggcctgctgtggatcgaccgccgcgccttttgggaagctctgcaccatgtgatagaacatcacgccgccatccttgtgatagagcagctttgtattgatgaaatcatcgtagacgctctgcggctggcagttgatgccgctgacgagcggcccgccctcccatgtggttttcttttcctgcatgacgtaaagcatcacgccgcgcatggcggcgcgggactgtgtgccctttttgtagttcacgaaatgtacgatggccatacggctcaccgtccttccatgacagcccgcaacgcgacgctgacctcggacaactcaccggcggctttctccaagccgatgacctgcactttgcccatgttggcaaggacggtgaggcggttgatgttgctgccgatgcccttgagctggcggagcagttctttttgcccgtcgatgacaacgatccgcttgccgaggcagcaggcggtgacgtaatcgctcatggacatgtgggccttcgctgccagcgccctgatcttctcacggtcagcggacgccatgcgcgtgctgaatttgatatcttttttcatggttttctccaatcgtagctttaagtgggtccgggcttccgcccggaatttgggtgcagggctttgcccgcccagagcgtttggcagggcagcggcttcgccgcagaccagacaaatgcgatgctggccgtcgtccgagcggacgacaaatccctcgtcccgccgcaagcggcaggactcgctctctctgtcgctcgtcctcttcccaccgaaaccgcttcgctgggtttcggcgggagccctgttgggggaggtgataagactcccgttttgcattttcggcatttccgtgtggggggtggtatcattaccctcggcgtgcgcttcatgccgttgaaacgctggacgcgcggggggtttggcggcgtattcgtcgtttttatgccgtctcggaatttgccccgtgcgggctgaatctcccctcgtcgggtacacacaccaccccagcctttaaccgcgcacacagcggctcacagggcgaaacagggggcattttcactgcctaagacatcggcagggtcgatagggtcaacagcttgggtaccctgtgcatcgtcactttcggcacggcgcagctcaatgagccgcttgccgttgctgcggcgcaccacggcggaaatgccaatttttcttagtgcggcaacgctttgcaggattagacgggataccttcttcggcgtgatgccctcgctgcccgcagggtcgatctgcgcggacagctccgtgggagtgccgataaattccgtgcggtcacgcatcagctcagagagaagaatgacgatccggccacccaacagctccggctgcgtccggctgtccgacaccagctcccacacattttccgcgttgcgctccagcgtcagctcccggtactcgatgtcacgcccgatgcaggagagagttgccttgccgctgccgcgcttgtcctctaccagcgtgaagctggaatccaccgcgccgctaatggcagtcgtaccggagatgcggctgaacacatcgtcggcaaactccttccgcagatggtggatcagaaggatggcgatgccgtgggtgtccgcaatacgcttcagcgtggagaggtcacggtagtcatttgcataggtgttgtcataaccggtgccgcggatcatttgcagcgtgtcgatgatgaccagcaccgtgtcggggtgctcagagaggaacgcgcagagctgctcctccaagcccttgccaagggtgtcgctgttggtggagaagtggacgttggcgggagcatcctccgtgatctcaaacaggcggttctggatgcggagggtggagtcctccaggcagaggtagagcgtggtaccctgtttcacgcccatgccccaaacggcttcgcccttcgccaccgtgaccgccagccacagcgccagccatgattttcccaccttgggagagccagcaaggatgtgcaggccctgagagagcagcgtgtccaccacgaagttcagcggcgtgagcggctgactcatcagcgtttctccgtcgatggtcagcaatcggttttcttttttcaatttcggatcctccttaaaaatattgctcccatcggaacgatgagagcgaaaaaagcagaggggcgttaccacgggacggcgcgtggtttcttccctctgcttgtattgtggaggaatttatgctatgctgagaaaaagcatggacagattaaaattcatgtaggacagattttaccaggaggggcacatatggagggcagcatcgttttctacacctatggcagtacgctggagctatacggtcagcagttcactgccggtatgttgaccgccgatctgctgaacctgtcgccggacgaatatcgacccatgagcaaacgcatgaagcaggtcaccagccttgcggaggaatatgagcaaagcgggagcatagagctttggtggaagctgaatgaggagttggcggcgctatgcggagtgctgcgccgctacgctgtgttccgcctgctgctggacgagagcgaggacgctttcttctctgtcatacgggaggtcacggggcagttcgatttgtttccgaaagaggagcatgcgccgtcagaagagatacaacggaaacgacttgagcgcgtggcgaatgaaatctccgcgcgcagtgaaacggtcaaggatgttccgcctgacctgttccatccgagcgaagcagctttggaaaaaggcgatgccttttattacgaaatgcttcgtgccatcggctctaccaagggcgcatggcgtgattacaaaaagtacatccgccgttatgaaacatatcttcacgacattcgcgctttcaacggtactattcggaatttcatcagctttagtctgtccaagctgaagcataacagcccagaggactatgccgcagcactctacggcttctacaatgatgaacgcatcgcagagaagctgatcgtcaatcccatccgcaacaacggcgactgctatacgacccacgatgcctacgagctttcctatgtgccgcggccgctgccggacggctctatcgctatctgtcaggagcatgtgaccgacagcttgcaggcgctgatgaaagcggattatatgctggcgctgaacagtgggcacaacatccgccgctgcatcatctgcggacggtattttctgctcaagagcggtgtccatgctttgtactgcgaaggggcctgtccccatgcgcccggctacacctgccggcagttcggcacggtggaggtgcagaaggagctggcgaaggacattcccaaggtcaaagtcaaggtgaccgcctttgcccgcatcacaaaggatatgcagcggggtgcgatctcacaggaggacacaagaaaagccaaggactatgtgcgggatctgctctatgacgctctacgtgacgcgaatatctccgtagaggctttcgagcagcgtatttcctctgagcgcgtttaccagcactgtgggatcaccagaacggccaatccgaggggccgtccgccgaaggaaaaggcgggtgagcaatcatgaccaacgagcaactggttcgccaatattatgacggcgatgatgctgtgctggaaaagctgtaccataaaaatatcggtctgatccgcggcatcgccaaggaagctgcggcggagttcaactgcctgataatggagcagcatcatccgaatcagtgttccgcgtatacgaaaacgattctggacgatctctgcggcgagggcgccgtggagcttctgacacggattcagagcagagaatatgacgagagccgcgccgcgctcaccacctacctttacccgcatttgaaggggcgcatgacccgctggctggaacagaatattggctgcatggcactgagcaaggacgagatgtctgccgtccgtcaggcgcagaggctgtatcatgccgcatggaaggataccggtgaaatcgcggaggagttaggcatctccgaggctcgtgtcagccgatatgttcgctacaacacccatttcctcggtgtgcatgatcttgttccggagggctatgacggcgatccctacgagcggctgatgccggggatgctctccgtttcggcggagcaggccgtgtaccgcaaggtctgcatcgaactcctccgggagctgttcgacaccctgccgaagaaggacagggacattctcggcaagacctgcggcgtgttcggatacccggaagcaactttgaaagagatcgggatgtatcacatgatgaaggagtccgccgtggagaaggcgaagaaccgcgcggtcgagaagctaagaaaatcctatcccggcagcaggctccaagtgtggagggctgttcatcgtatgatgcagagaccgattccgctgccgggggaggacagtgagctgcggcgcaattttccgcagtatgtccgcgccttggcggaggtctatgctatactggaggaagccgttgcaaacggagagcgatacttaggcgagaatgagagctccaatacctgtgaaaagtaaagctggaggcgtatgtaaagattgtggatggtcctcttactgcatagccgaatctgccgccgacagcgaaaactgccgagcggcagtcttgcaatatgggaagataagtagtcaactcaaaattttttacaaaattctttgtaagatttttcgtttttcgcagtcttataagtgaacgggacaaggaggtgagcaggtgacggactttgaacagatatacaaagactattttcgggatgtgtttctctatgttcgacggctgtccggcggggacgaacggctggcagaggatattaccagcgaagccttcttccgtgcgcttcgccgcattgacagctttcggggggattgcgacatccgggtgtggctgtgtcagatcgcaaagaattgttactatacccatctgaaacaaagccgctggacagagcatacagcggatatggaacagcttatatcggaagcggaggaatcaccggatgaaatgctgctgcgcagcgagaatgcccaacaggtaaaatatctgctacatgagcttcccgatccgtacaaagaggttttcatgtggcgtacccttggcgaattgagctttaaggagatcgggaagctgtttcacaagacggaaaactgggcgtgcgtcacctatcaccgcgcacgaaaaatgatccaaaagggaatggaggttgacaaagatgaaaaatgaatgcagtatcatccgcgatattctgccgctgtatgtggaaaacatggtatcggaggatacgtcggagtttgtaaaggagcatctggaaagctgccccgcctgccgtgcggagcttgaaaaactgcgggagcctgtggaggtgcaaacagagccgcagcccgacatggatgccgcgccgctgaaacgcttgaaaaaggcactgctgatgaaaaaggtgcagaccatcctatgcacggcggcggtgctgctggcgctgatgctgtcggtcgtctcctttctgactgcgccggaatacttcgcctattcgccagagctggtgactgtgacagaggaagcaaacggtgcggtgacgctctctttcagcaacgaggtcacgaattataagctccaacaaatcgccgaccccgatgatcgcaacactgtctaccatcttgaggtgtggacctccgtatgggacagagcgttccataaacccggcgcgcaggccgtgaccgcagcgccggagagcggcaagccgcttctcgtttatttcacgcagtttatcaacggacacgccgaaagctccagcaacagctcggtgtgcatctacggcaccgcgcccgacagcggcggctgggtcgctttggcggggctttctttgggctattggctgctattcaacatcgccctgttcctgatccttatcggggtatggttcaagctgcgcaggaaagaaaaatcccgccgccgggtggagcacctgctcccgatccctatcgcatacgggctggggcatctgtgtgttatgggctttcgcactgcatcctgttcggaatggcgcgactttcaactgatccttgcagtcggtgttctgttctactgcgctatgctgctggcattgagtattttttataacgtaaaagagctgcggggtataaaaagagagggtgagaacgaatagcggtctgaccatttggaaagtaggtgtaccatgagaaaacttgtgatcttttgctttgccgtctgtatgaccgtgctttcggtactatccctgttcaattttgcacaggacgcagaggaaagtatgatactggataagcgggcggtaatcctcgaaaagccggagacattgagcaaccgcgaatttttgggacagatagatactgcactcggaaagatcggcgcagacattatgtaccgctacgcggagctggatggggacaagccactgtaccgctactataagaccagccataccgacagctttctttccgtttctaccgggaaagggagcgtgaggctggaatcggacgagttcttttccactgcaaagcagccgggagctatggcactgcatctgtcctcgctgtttcaagataccgccatctatccactcatgcaggcgcggcagcatgacttgaccgccgcgacctggtatgtggcggaagggcagcttgacgcggtgcttcatgcgctgaaaggcttgggctattccgtaacagcaaccaacgaaaggcttttgtctaccaaactgccgctttatttcctgttcattcctgcctttatgctctgcgtcagtatcgtattctacaccctgtccgcaggcaaaaaaaatgtgctgaaaaaaatggagggctataccacggggaatatcctgctgggagagatcaaagcctttgcccctgctttgtgtctttgctttctgctgatttttgccgccgccatgatttgcgccgtgtggcttcatccggtggcgacctggcaatttgggctgttcctgctgggggattgtctgtggctgctcgttcctctgatactgggcatcctgctctccctgctgttcctctctgggcagcgcagcgcggagtatgtgaagggcaaagttccaaagcgcggaatctacattacaaacacgcttgcgaaagctgcttttctaatctttattctattctctctcaccattgccatgcggaacatcacgcagatctacaacaccttccatgcagcggagttctgttcgcaaaagacaaagggctatgtgactgtccctctgaacaatgttaattccggcagagcaccggagggcgcggattatctggcgttctattatgccacagtggatcgctacaatggaatactcatggcagccaacgattttaattacgacctgtttgaagggaaaatgctgggagaggcatacggtcaggattatgcccacatcaaccgaaactaccttgcgttcaaccccatctatgcgccggacggggagcagatcggtgacgctctgctttccgatacccatgtgaatattctgcttccgaagtccaaggaatacaggcgggatgaggtacgggagcgcggcgcgagctggggaaattccggggatgtgaatattgtcctctacgatgataaagcgtctgacatatactcctataacgccagcacagggcttgggggaaacggcgctctgcccgcgcccatccttgtagtcaaggaaggtgacctgctggacgggcttttcatcgaagcatggtgttcacagggggcgtatttcctctatgttcccactgatgatccgtatgcggagctgctgcccatcctgcgggaaacgggtattgacgcggcgaccgtttccacaccgaccgtcgccgccacctttgataaaatgctccatcatctgacctatatgctgatgatttggggcgtacaggctttggtgctgctgatcgggctgttctgcctgatcttattcggcgcaaggctctattgcgacaattacagggacaggatcgcctgtcgcctgattgaagggcattcccttttgagctgtattcgcacccatctcgtgctgacggtgctgtactatggggcggtagcggcagggctgctgctcttaaagctcgccatcgagcttgactacaatatcctgctgggtacgcttctcgcggagctgctgatcacgctgttggcttgcggcagcattgcccggaagaacctctatcagattgtgaaaggagcggaagcatgactgccatcactttatccaatatcaataaacgcttcggggaaaaagtcctgtttcgggattactcgctgcatattgaagccggagagtttgtcgccatcaagggcgaaagcggagccggaaaaacaactctcctgaacatcataggactgctggaaacgccggacagcggcagcgtcaccctctgcggcgcaagaaacccgtccttttcctcccgcgctgcggttcatctgcggcggcacaagctgtcctacctgtttcagaattacgggctggtggacaccgacaccgtggaagccaacatgaagctcgccacccggttcggtaaagcaaagggcaaggcagagaaagaacgcatcgcggatgcgctggcacaggtggggctttcgggctatgagcgtcgtaaggtctacaccttgagcggcggtgagcagcagcgggtggcgctggcaaaaatcattgcaaaatcccccgacattatccttgcggatgagcctacgggcagtctggacgagcgcaaccgcagctatgtgatggacattctcaaagagctgaaccgacaaggaaaaaccattgttgttgtgacccatgatccctatgtgagcgattgcgccacacggcatattgcgctgtgagaggacggagggtaaagctatgcgaaaaaagagctgggctgccctgctgtgctcgatcctgattcttgcgagcatagggcttggcatttccatcatttactcggactactatttcagccccgtgtcgggcttgcaatcctttactgtcgcggacgtctcccggacataccttcatccggaggaggacgcaggcacgccaagcgccgccgcgccgtccgatgagctttatgtgctcctggaacactgggcattggaaaacgaggtgacaatcctatacaagaacgggtttgccgcaggctgcggcattctggacggttcggattggctccgtgaagccatcgggctttcgctgccttgtgatgcgcagggcgtattaaccgcagaggacgcggctttttcggaaacctatgtgcgcgacggacggtttttgccggacgcgctggggctgcctgtactgggaacctatcgggaacaggatgtgccttccgttatctccaatgcagggtttctctatccgttgtccatgagcgaggcgaaggatggaatgtacttcacagatggcacggacaccagtggtctgacggcactatttgagaatagcggctatacggtcactgaccagcggcagcgtttgagccttcccgcgctggcggcgaagcttctgacggacagcgttctttccagagcgatttccgctgccatgctcggtttgatcttttgcttctcctatgtggtgctgaccatgtatcgggaaaatgaccgccgctatcaaatctatcatttgtttgggctgtcaaaagcacggctgttcctccgctccacccttacggcgatgggtattgcactgacggctgctctgcttttcggcgtggcgctgtaccaggggctgacctatatgccggacagtgatctgaccacgctgctgataggtactacggcagggtttgtactgttctcactgattttgaactgggcgggctactgcggaacagccgcacggttggggaaagggggaagatgatatgacactgatcaggcaggtgatccgggatttggtcaaggatgccggatgggtcattttttacggctttttaaccgcaatgtccattatggctttcgtgctggtgggattgagctaccagcatgtcgcgtcacaaaatgatgcaatccgtcgctttacgcaaaacgatgtgagcatggtgcgggtaaaggatttgagcagtcttatgacagcggctgaccggaaagctaccgcacagcctatcagcacaggcagtgggcggcagcagggcctcgtggatctgtttcaaaagcatgacaacctcggcagcctcgtccttctccccggcatcggcgggtatcagcagaccatcgtttatgtgggcgcctatactcggctgacagcattcccgtttccggcaggcagcgatgcacccatcgccgcggtttcgccggactgcgccggggacaaaggaaagacgctccgcatcggagatcacgaatgcacagtgaccgttgttccatccgatatggacgtttaccatccgctgcactacattccgcccgcatcggagaatttgaagaaaacgctctatgttttctcgccatcctgtggggatgccctttccctcgcggcgtttccacacgtatcggtggacatgttcatagaccgtctgattcttgccgaacccacagaggaaagcaccgccgatgtcaggtcgttcctgtatcaaaactattccgcctatgcggagatacagtcaacggaaaactttttgcggctttccgccgcaagcagcacccgcacccatcaggcgtatcttctgttctacatcatgtccacgctggttttattcggtgcgctgctgctgaacacctatcgcatcttgcgacgcaggatcccggaatatgcggtgcatcatctgtttggcgcaacacagcggtttatctttgcaaggatgtatctgttcgtgttgggataccatgtgatcccgcttgcgggaacgctcctgatcctgtcattgaacaggcttgcgtcgccgctgaatcttctcatggtattcgcagccaccatgggctcggcgttccttgtcacaagtattgtgcagcagcgttttgtatctaaattttcacagggattaaggagggaatgaactatgccgggaatcaccgttacacaagcctgcaagagctatgaaaccagccactataccgtaaaagcggtgaatcacgccgatctttccgtggaaagcggcgaagccgtcgccattgtcggaccttccggcagcggcaagtccacacttttgaacattatcggtctgattttgaagccggattccggaagcgtcgccgtgaacggaaaggaagtcctgaacatgagcgacaggcggtgcagcgctttccgaaatgcctcgttcggctatattgtgcaggacttcgccctgctggacgatgaaaccgtatatcacaacatccgaatccccttgctttacaacaggcagatcaagcgcagggagcacaagccccgaatcagggagatcgcgcagaagctggacatatcagacaagctgaaccgcaaggcaggcaaattgtccggtggagagcggcagcgggtggcaatcgcccgtgcaatcgtctgtgaccagccgatcatccttgcggacgaacccaccggttcactggacgcggcgaacaaagcgaatgtcatggacatcctcatgcggctctgcaaggaaagcggcaagacgctgatcatcgttacgcacgacccttcgattgccgaacgctgtgacaggatcgttcagatggtggatggctgcattgagggaaacggagaaactttgctgtgagagggtgtgcgcccattaccagggatttcagagtcaaacagccgcaagccaccatttttgatgacttgcggctgttctgttcagcagctcttttggtaactctccatcttgtacgctttgcttcgccgaagcgctggaagtggacgatctcccgggcacgcaggaacttgatggcatcgttgacgtccggatcatcggacaggcgcagaatgttgtcgtaggtcaggcgcgccttctgttcggcggccagatcctccgtcaggtcggcgatcatgtcgccggtaacgccgatggagcctgccgaccagggaaaaccggacgccgcggtgggatagactcccgtagtatggtccacaaagtaggcgtcaaatccggcagtccggatgtcctcgtcggacaggtttcgcgtcaactggtgaacaatagtccccaccatctccaggtgtcccagttcctctgtgccgatgtcggtaagcaggcccttcaactcagcgtagggcatggagtaccgctggctgagatagcgcagagaagctcccaattcaccgtccgggccaccggatggtaacagactacgattaggggcaaaaattattccagcatgagccggtagtggatggttaggaggttctgcgccttgtcccatgtgatgcggtcgatgatggatcgggcggcgttgcagcgctgctccagcgaggcgtcctcgttctcgatgactgccagggcgtcgctgatggcggagcgcatgattgagacatcaccggcccggcggttctctgcggcggccgcggaaagttcctggtcgatgcgctggatctgtgcctgtgcgtcctccttcaactgccggtattcctccacggtatcgacgccggcgaggaaggcctcacgaaggcgctccagacggcgctccagcgacgcacgctgtgtccgaagggcggcggtggtatcaccgtcacgcccattgacgcgcagcacctcgtagctcagaggggcggacgccgcagcgtccatgtggagccggtcgaggatggcttttttcagcagatcggaggaaatgtgctgggaggcgcggcagcggccacgcacatagttgttgcacttccaataatggggcttggcaaagataagcgtggaaccgcaggaagcgcagcggaccaagccgctgatccagtccttgttgctgccgaggggccgggccttgtagggcatggcggccttcagctgcgcgatgcgcgtctgcgcctgctggaatgtttcctcagagacaaggggctcatgcttgccgtcagtcacgatgatattcggatccgcatagtcccggcggctacggccggcagggttccatcgcagcttgcctatgtacaccggattacggaggatgtattcgacggttcggtttgcgaaggtgctgccgcggtgcgtcttgacgcccatggagttgagccaccttgcgatggagtaaaaaccctcaccggaaacgaagcgggagaatatctcctgcacatatacggcttcctccggcacagggaccaacacattgtcgaggacggtgtacccgaaggacggcgtggcctgcagctcgccacggcggtgcttttcctccatgccgcgcttaacgtcctcggccaggttgatggagtaatactcatccatggcctcgatcatggactccataatgacgcccattttgccgtcctcgatgggttccttgatggagatgacctcgatcttcagctgcttgcggaggatggacttatagtatactgcatcgtcccggttgcgtgcgaagcgggagaacttccacaggaggatggcgtcaaagggcttgggtttggtcttggcggtggcgatgagccggcggaactcgtcacgcccggtgaccttacgcccggacttcgcctcgtccacgaaaacgaactcgtcggggacaaggtatccattggccgtgccccacttgcgtatctccaccagctgggaggcgggggagagctccacctgatcatcggtggaaacgcggatataggctgcggcgattttcaaatcagtcatgctcgtcacctcccggctcgtggccgatgaaaacggtgtgggatcgcttggtatacagggaggacatacgaagcaggcagcggaccatgacgtaaacggcgatcagcacagtcagcaacacgaaccacgcgcccggagacatattgccgccgatgacaagaccggcggtggggaggtgaaagtcccagatgaggtagcctgcggcaacgatggacagcagcgagcacaagatgatgagcacatagacttgcctggtcaactcgtaccggaggatgctgctgccgtcccgcagactgcggatctcgccgttgcggtccgccagctccagctcaagagcacggatacgctgctccagctctgcacgctgctgctccgcctccggcttgaccgcaccgaacatctcatcgatggacaggctcaggacgcgggccagcgctgccgcctgcacgatggtaacaccgccgttgccgctttgcgcgttgcggacggtggagtagggaacgccggagcgctcggacaattcctcgttggtgaggccgcagcgggcccgcgccgtgcggaaagcttcggggtatgcgcggatgtatggggataactcgtcaataacggacatagtgcccctccttacatgaattacccatattggggagcaattccccaatatggacaattatttgcccgcatacgggcaggaaaaaagcgagaaaaaacgcgaattgttaaaatagagcagaaattgtcatgatagctcattgacttttgcgatgcgccggcaggataatgaatgcagaagggcgcaggaagccggacgtaaaggggagagaaatgagtttagatgacagaatactggaaaggttccaactactgacagaggacgagaaggtcctcatcctcgttggcttaatagagtctctatctgggccagcagcagacacttctgatcctcggtcagacagtgcagcagctcgatcagcttgacatccagaggggaaagaccgtcgccgggcatggcggcggttttttcatagctggcaccaaagaggagctcactcttatcgacaccgaagaacgcggccagcttttccactgcgcccattctgggctcacgtttgccggactcccatgtggatacagctttgtccgagacaccgacggcgtcgcctaattgtgcctgtgtgaggccgcgagactcgcgtaaactcttgatattttcaccgatgggcataagcatcacctccgtgtttatgggtacagcatatactaaatgtaggaaaattgcaacatcaaaaaataatattcctacaaaaagttcttgacatcctacatattgtagagtatagtgtgaggcagaaggaggtgaacgagatgcaattctcacccaaaatggcacggcaattcgccggactgacgcagatggaaatggctgaaagactgggcgtttcccgcgatacctacaggcgcatagaggcacatccggagacagcgaccatctcgcagggaaagatgatcgcggcggtcaccggcgtaagtttcgatactattttttttggcggaactctacaaaaagtagagtttcgacataaataagaccgcgcccggaaggacgcggtcggcaggggactatttctttttcttccgggaacgcatggcccactcgtagatgatgaccgggatcgcaaaggcaatgacagtctccacgatgccgagccagaacttggtactcgtgacgagcaaaacgagatcgtcccatgccaagtagcaaaagagcagtgccgagagcgctacgagcagtttcttcaaggcgaagcacctcccatttacgccggtatatcacggcgtgggggccgcaaggagcttgctgacttcgatccattggccggtaaatggggctaaaacacagatggccttgtcgccgatgcactcgaaaaagggaaaacgattatcgccatcggggatgtatctcacggggacatcggagttctcttttgcgaatacgagaattgtgttggatatggcaagctcgtcttcggagccgcgcttctgtaatccttggcatagcgtatccataggaacctcgtaattgacgcctaatggagcgtcgagctgaggatcgtttaggtaaaccttatcatctgccacataggacacaaaagagtaatgggccgaaggatctttgggatccggatggtaattcacaaacagctcaagcccctgttcgagacaaaaagggataaaagttcgcgggtctctcgcggaaacgaccgaacaatataggccgcgcttctgtgcgtatcgggcgataaggctgttatagcacattggttctccgttccaaccaggggcggagacttgagatgtgatttctttcaatttgcttggccgaattttgtaatgctcaagcagcatggcaaggcaagctgcgccacagtttcgcccctggtcagactgcctgcgatggggcagacggcgagaagtaatcatattattcgatcccctttcattttagcataccgcaccagcgtggctgatcgctggtcaatgcgctggctccatagaagcggcgtcctcgacgacgagctccatcccgataaaatgcaccatggcttgaataaagcttttcatatctgctatatcacgatcctcgtgctttcgagtgtaatgcgcttcatcgttgccgatccaagcggcacggctggcgagtgtctggatcgattgctgcggaatgaacttaataatgcacgttttcagccaagtgcgctctatctcgtcgctttcgccgggatgcatgtgtttgcaatagtccttgaccaagaactccagggccttccgataaccgataccggcaatttcgtcaagctgctggttctccgcctcaaaggcttggttgtaaatttttacgaactggggcgataaaccttgaatattgacatcgaactgctgctcggaatatagcttaggcccgcagtaatcaagctggggctgcatagtcttaccctctgggtcgctgtcaatgaaatgagcaacaaaggggcggcagcagtgcgggcaggtataaaggatcgcgaggtgtcgtttacctccgttatctctataccacgaagttccaattaagttaggtaaaatggcatagtggcaaaggggacaggtttctgactcatcgtagaaaaccactgcgttcatttcgccttggaactgggtagcgatacttttctccataaataatcccacctttcaaattgattatatcacatttgcgaaagactggcaagaagccataggacaatcccggcggggcataggatggcaggaaaggggagtgacaatatgtcgaagcgggaacggccgcccatcacggtgaaggcctatgtgaaggtgaacggcgtggagaccgatgtggacacgctggacgaagcccggcggggccagctggcgacggctatccaggtcacggtgctgaataccttttttgccggacgtgcgaatttctacccggcggaggccgggggaaaataatcaacaacaggaggaaaacaacatgaaacatgagactttgaccatttggagcgcggaggacttcacccgcccggagaagctggcggcgctgcgcgtgggtgacgaggtcgccttccaactcaagaacggcaaggacgccgcctttgtggtggcggacatcgccgacggcgtccttaccggctgcctttttaagggcgtgcgggacatggccatgtacgacggccgccgctggtggaacaccgactatgtgaactatccggagagcgacgccagagagcgcctcaacgaggagctcctgcccctgctgccggaggagatggcggcgctgctgcttgcgcgcactatcgtacagacggtggacggcgaggtgtacacctgcacggacaagctgtggcccatgtccgcggtggaggtgttcggcaaggacgcgccggactggatgcagcgggacgatacgccggacaagcccctgccgttctttgccgagagtcaggccgaccggaaagcgtacctgtggtatgcctggctgcgctcgccgtatgccagcaccagcagcattttctgctatgtgtacacgtcgggcgccgcgaactactaccctgccggcttttcgcttggcgtcgcccccggctttcgcatcggcatcaaggccaagacggcggagccggcgcaggactgatcgaaaaggccatcccccggcgcaagccggggatacgaaaggagcagagcatgaacaagagaaagagccgcggcgccaagttcgccgaaggggagcagacggtgtgcctcaccccggcggctgcggagagaaacggcgggcacccgcccataggcacggtactccgggccacgaagcggaacggcgcgtgggcctaccaggtgcaggtgcgggacacggaccgcatcgagacctggtcggaggacacgatggggaggctggcggtatgagcgccttcggatggatatgcgcctatatcggcgcggcgtggctggctggggcggtgctgaaatgcgtggaggcgctgggccggtgacagagacacggatggaacggaaccggcgggcgcgggcctacagccacgcctgccgcatccggcggctgcggaatgccctgtgggcggtggccgccgtgctgacggtgctgctggcggtggagctgatctggctgctaagcagcagaccggcaccggagggcaccgcgcaggagccgcaggagatggcggtcctgctggagccggaggtcacggaaagcaccggcgtgttcacggtgacgggctactgcgcctgctgcacgccgtacagccacctcaaccgctgcggcgaccttgtgctgaccgccagcggagagtgggtacaccccggcgaggcggtggcggtggatccggacatcatcccgctgggcagcaccgtgactataggcgaaaagacctacaaggcgctggacactggcgtgcgcggctatgtggtggatgtgctgatgagccacgaggacgccgccgcggccggcgccagaagggagctggtaacatggacaaccgacctaagacagggagaaatgccgagctgaagccctgcctgcactgcacggaacgctacgtcggctgccacggaaggaacgaggacgggagctaccgctgcgggaagtacgccgaggtggaggccgccagggcagaggaacgggtgaagctgaccgcctaccggcgggagaaggagatagaccgctaccagcggcgcaagatcaacgagttcagcaccaaggccgaaaaggcccggatgcgcggaaggggacggtgaatatggccgagggaaagggcaaaaaagacgacttcctgtggtgggtacagtgcgatggccactacgacgtgccggtgatcgcccccaactgggagctggccacggtggaggcggcgcacctgtggggtgtgccgtgggccaaggtggccgcccggtgcgagctgcgggagaagctgcctgtggtgcggaacgtgtgccagcggtgcggcaagatctttcacggctccggcccgctgtgcgacgactgcatcagcatcatccgcatagaggagcagcggagggccgccgccaggaaggactacttccggcggctatatgccggatactgaggggccgggcgagagacaaacagacaaacaggaggaactgtgcgatgaacgagtatttagacagggcgctgggcaagctgcacggcgccaagacgccgacgggccaacgggaggccgtggtgttcaaaccggtggtggcggcgctggaggacttctgccgacaggatgcggagttcgcccaggcggtggcacagggcggcagcgtggaggactgcgtcaagaccgtactgaagggcgtgggcggcagcctgagcgaccttgaggcctacaagcgggcggcggcgttcttcttccccggctgcgtggtgaccatgaagctgtccattgccatgtgcgagcacgacgtagtcccggcggcaccccaggagcgcaaggccgtggtgctggatctggcggacttctggtgagcgccatgatggacgaaaaggagagggcctccaagctggagcgactggccccgaagcccacagcgcaggagatggaggcggtcaacggactgttccggcacttcctgttcaagcgctgcggcaagggcgagatatggactacctgctgccggcggcataccttcgtcaagccggacacggacaacgccgacgagctgagagcgctacacgcgccccacacgccggagccccggaacggctgggaccactcgcccacggtgaaaaggcgctgcaggtgcccatactgcggcgcggaggtcaccgtgaaggaactgcggtactccggcgggcgggccaacctgtggagcttccggcgagcggtcatcctgcggcagtggcggggcgccctatgggccacggcgtgggactgtgagaagaactacagccgcgtcggtatgaacggtgagccggtactgactgagcttccggagatgaaactgctgggtgtgtaccgcttcgcgccgggcgtggcggagcaggccacgcggccgtggtggtgcagcggcggcacacccatgagctaccaccgccagattacgcccggcaagagcaacgggcgcaagggcgggctgtggaaagtgcattcgccctacacctactgcgccgaactgggcagcagctatgacgtgatcgggctgctggaggcggacaagggctttatgcgctggtgcggccttagaaagatacatctcccctcggatgacttcattgagctgctgacggcgtgctgcttttacccccgccagatcgaaatgctggtgaagctggggctggaggacgcggtgaaggaccttgtggggcgcggcgtgcggaacgccgacatcatcaaatgggacgcggacaagcccaggaactttatgaaatgcacgcccaaggaagcgatggcggcgtgttccgtgggagagccgatgcgggtgctgcggctgtatatccggcacagggacacgccgctgaaaatgaccatagaaaccgcggcgtggctcgctgaggccaccatcggccgcggcgaggagaactacgccgtgcgcctgctgaagcggctggacatcacggcggagaagctgacggcctatctggaaaagaaccgggtagcgctgcaggaaggcggcaggcccggctccagcacccggagaggggtgctggagctatacaaggactatctggacgcggcggagcactgcgggatggacatggaaaaccccctgatcctcatgccgcgggaccttgtggaaaagcatgaccgggtgacagcggcgtggagcgccatacagcgccagtaccggaaggcggaggacacagcggcgcagaaagccgccgcggaggcctacaggaagcggctgcgcgccctgtctgaaaagtatctattctggacggacgacttccttatccgcgcgccggtcaacgccgatgagatcgtggacgagggcaaggcgctaaagcactgcgtaggcggctacgctgcccggcacatgacgggggcgacaaccatcctgttcctgcgccggcgggacaggccccacacgccgctggcaaccatcgagatgaacggcaacacagtcgtgcaggtacacggctaccggaacgagctggagggctgcgccgataacccggaccgggagagtgccagaaagctgtacgccggggtgctggatccgtggctgaaatggctgaaggccggaagcaaacgagatgaggacggcaggccgaagctgccgaaaaagagagcgaggaggaacgcggcatgagtatgtatgacatggtagacaccacgccggaggggtattctgagggcgaggaactgagcaagatgttcagcgaggatgatatgagcgaggcctttgaggagcgcgacatcgacgtcatcacggaggagatcaacttctacaagcagcaggccggcatggccattctggagattggcaagcggctggtggaggccaaggcacaactctcccacggggagtggctgccgtggctggagaaaaaggtggagttctccgagcgcagcgcgcagcagtatatccggctgtggaaagagtacggcaaatccgcaaccgttgcggatttgggcgtgcggaaagccttggtattgctggctttgccggacacggaacgcgacagcttcgccggcgaaaagcatgaggtgaacggcgaggagaagaccgcggcggagatgacggtgaaggagctggaaaaggccgtagcagagcgcaacaccgcccgccaggaggcggaacaggccaaggcggacctgtacgccgctcgcgaagccgccagggaggcgcgggatcatgtggaagccctgcggggagagctggaggcactgaagaaccggcccacggaggtggccattgaacagagggacgccacagaggagcagctggccgctgcccggcaggaggccgaggacgccgctgcccggcaggtggcggcgctggaaaaggcgctggagaaggcgcgcggcgaggcggcggctgccgaggagaggaaggaggccgccgagtcggagctgcaggacgctgaacgggagcgcgacagcgcactggacgccgccaagggctacaaggccgaggcggaggccgcccacaagctggccgccgcggccagcagcgagggtatggccaagttcaaggtggtgttcgatcagacggtggaaaacgtgaacaccctggccgcactgctgcaggcgctgccggacagccagcaggagaagctgcggcgggcgctgctggcactggccgaccaggtgcggaaggtgggcgcttgatatggcggagcactgcagaagctgcgtgtggcgctccggccgggatgggtacaaatgcgactacgccggcaagacgaaccacacacgaaaggcggagtccccgaatgggtgtacctactatctgcggggcgacatcgtaacggacgaccggacagcccagcggctgtatcgcaaggtcgtggcaaagagagaagcggcggggctggcgtgggccgccccgtaccgccctcttttgaaagcggctgcccgatgaacgggcggcggctttgaggagaggaggcgagggtgtgaacctgcggaaccccaaggaatactgcgagaacctgctgtggatacgcacgaaaaagcagacgatggcgcacctgcgcttcaacgacgcgcagaacaacctgtacggcgtcatccgccagcaggcggcgcaggggaggcccattcgcctgatcgtcctcaaggggcggcaggagggtatctccacagtgacagaggggctgatgttccaggacacggtgacgcgccccaacgtcaagacgctgattgtggcccacgaaaacacggccacggccaacctgttcaaaatgaacaagctgttctacgacagcctgccgcccggcgcacagcccatgcggaagaactccaacgccaaggagctggtgttcgagaaccccaccaaggacgagaaggagaagcgccgccggccgggcctgcggagctctatccgctgccagacggcgggaaagggcggcgtgggccgaagcgatacgctgaccaatgtacatatctccgaatacgccttctggcccaaaaacaaggacgagctgctgctgggcatcatgcaggcggtgccggatgagccggacacgatggtggtcatcgagtccacagccaacggctacgaccacttcaaaaccctgtgggacgacgcggtggcaggcgtcaacgcatggacgccggtatttctgccgtggtatctggagccggggtatcggaaaagcgtgccggcgggcaccgtgtggagcgacgaggaggagaagctgcggcaggacttcgggctggacaacgagcagctcatgtggcgccgctggtgcatcaaggccaactgcggcaacgacgcggccatgttccggcaggagtaccccaacacgccggacgaggcgttcctgctcagcggtgagggctacttcgacaacgcggcgctgggccgccagcggatgcacgcaccggcgcccgactccgtgggctggttcgtattcgacgagccggcggagccgggggacgcgccccggaactggcggtacgagcctggcgagaccggggcggtgcgtatctggcagacgccggagaagggcgcgccctatgtactgggcggcgacacggccggagagggcagcgaccgcttcacggcctttgtactggacaaccgcaccggggcgcaggtagcggagctgcagatgccgctgtccgagatacagtatgcccggcagatctactgcctgggccggtactacaacgatgcgctggcggcggtggaggtcaacttctccacctacccggagaacaagctggaggaatggcactatccgacactctaccagcgggagcgcttcgacacctttaagaatgtgatggtcaagtctcaaggatgggtgacgtcccctaagacgcggcctcagatgctggctacgctgcacacggtgatggacgaggagccggggctggtgatgtcggcgtggacactgggggagatgatcaccttcgtgtacgacgagaaccgtaagccgcaggcggcagcgggagagcacgacgacctggtgatggcagcggccatcgcccacacggcccgcacccagcagcggtacacctccgactccggcggcgcggaccggcggcactggacaaaggatatgtgggaggactggcgccgggcggatccggcggcgcggaaacagttggaagcggagtggaaacgctccgaaaaataaaaacaggaggaatgtgcgacatggattttttcagtatcgtatgcggcgcggcgtcgctgctgtggctggcggccggtgcgctggcggtggaggaccgctggcggcagcggcgtctgaccaaaaagagcgaggaggcactggacaagctgctggaggaggtgttctgcgatgagcaagacgactgagctggtggaaaggctgcgggagttgccgcgagacacgcgaaaagccaccgtggagatctacgacctgtgcatcgaggcgtcgtatgagatcgaggagctgacggaccggtgtgcccggtacgccgaggagatcgcggtgctgcaggaaaagcagaagtgggtggacgcccatggtggaggtggtactggagtgaaggtgaaccgcgaggagctgtacaggaagacggtgtattgtccgacgtgccggggcgtgacgccacagggctgcccgcgctgcggcggggtgggactggtggtagtgccggccacaagaggcgacgtcctccggcggatgtcggaccgggagctggcggtgcagctgttcgactttcgctttgacggctacgccaaggcgcagggcgcggagaccgtcctgccggacacgatacagagcatagaaaactggctgaaggaggagatgggcaaatgaaaaacgaaggagggggggcggtgagacacctgcagatgtcggagagcgagatcgtgagcagctaccgcaccgcccgcgatcctaagcggcagatcggcatactggcggagctgaacgcggtgacgccgcgggagatccgagaggtgctggaggcggccggggcactaatgctgaagccccggagccacggcggcgggcggcctctcagcttcgacgccgcggcagcgcggcagatgtttgaggcaggcctcaccgacgaggagatggcccggaagctgggcgtgccggagaagcgcctcgccgaatggcggcgccggcaggggctcatgcggccgaagtacagcaggccccgcccggcggcggagacagaaaaaacaacggttccggcggctgtgccggagcagaaggaggaaactatggcggtgatgacgaaaagcgcctccgcgccggcggagaaggacgacaaggtggtgacggtggagacactgttcgacctgctgcggggcgcggtggacgccgggtacggcgaggctcctgtgacggtggagcgctgccgcttcacggagatgcgcctgcgtgtggagctgctgatgaccggcgggctgcgcgtaggcggcgagccggtggcggtggagctggagggcgtgccggaggcagcggcggggaaggaggactaaaccatggcggatgtgaatgtggcgctgctggtcagccagacggtgaccgaggcccagagccagagccggatcaagatgggccgggactatgccagcttctatgaggcgtgggcggtcctgcggcaacggatcgaggagaccaagcgggacgccaaggcgctggagaagctgcacagcgagctgtgggacgccatcaaggacggcaacgaggacgaggccctcattgagatgggcgccatcaacgccagcgccgcggcgctttgcgcggccttcgcgggcatggcggcggaggcccagcgggcggtggaggaacagacgtaaatgagaaaaagcccagccccggaaggggctgggcgatggcatcggcggacattggtatagccgccctggcgggctgaaggactgcgctcatgcgtggtgtactgacgtaggcaggtcggggcggcgatatgagtgtctgactaccttatatataatacgcgcgggcgcgtatctgtgggctcgttaaaagcctatgtttggcgggaaggccgcttgcagcggaggaacggcaccacgtgacggctcctccgtggacggcgggcaggcggctttaccggcgggcggagaaatgaacaggcggctcgtgcgggcacgggcgcgacctatgctattttatcgcgggagagggatgagcaaaccatgacgacggcgaaggagggaatgtacatgatcaccaagatcaccagcggctccgtggtggagcgccgcaaagcctatgtggggcgcaggccctcccggcggggggcgcggatcaagggtgccagcagcgagaagaagcaggagaacaaccggcagcaggccatcctcgccctggcgcggacactgaactgcaactataccaacggcgacgggtatctgacgctgtccttcaccgacgaggcgctgaccgcctgcggcggcacgctggcaggggccaagaaggaggcgcggaagttcgcggaccgtgtggcctaccggatgaagaagcacggcaaggcgctgaaatgggtgatcgtgcccagtgagatggacggcgagaccggggagctggtgcgcgtccacgtccatgttgtcatctccggccacggcctgcggctggaggacggcgtgttctggctgtacggcgagaagctggacgacgtgtggggcaacggcacggtggacgtgcagatcctgcggcggcagaaggattactacccgctggcccggtatctcatcctccaggcacggggcgtggcggacgagaagaagtacagcgtcagccggaacatggtcaagccgaaggtggagcacctgtacacctggtcacccgcgccgctgcgggtgccggcgggggcctcggcgctgccggggacgcggtacgacccggaggccggggtgaacttcgtgcggtacatacccgcccagcgggatcccgcccggaaggtgggcggcagcaaggagatggctgtggcctgtgccggggagccggtggagggaggtgacggggatgggctttaagaagctgcggggtgtgaagctgccggaggagaagcagggcttcatccgctacacctgtctgacgctctcggagcagccaaagtggatacaggagaaggtcaagtacacctgcgacatggtcggaggtgcgtacagccatgctctttttgagctgatgaccacccggaaaagcgtgacgtccatctcgctggaccacgccatcacggagagcgtgctgtacgacatgaggaaggccttttacgagagctggtaaacggctcgttttctgggataactgacacgctttaactgaatgaactgcccggaagctttgattttgcacggcctccgggctttttgcgtttttccgcatttccgtgataactgcacgttgaagtgttgcacaatggataaaacggagagtattcaccggcgggaaaggaggctggcggcgtggctgacaggacggaaaaacggctgggtgagaagcaaaaacgcttcgtgcgggagtggcttatcgatatgaacggcacgagggccgctatccgggccggatacagcgcaaagagcgcggccaacacggccagccggttgatgaaagatgcggcggtgcaggcctaccgggacgagctgctgaaaacagagtttgaggcgctgggcgtaacgcgccactcgctggcggtggaggtttggcgcgtgtacgagcggtgcagcgccgccaagccggtgatgcagtgggacagcgaattaagggcctacgtggaaagcggccaatggcagtttgactccaagggctgtttgaaggcgctggggatgctgcacgacatgatcgagcgcatgaaccgacaggacgacgaggacgagggcgcggactacgaaacgatgctgacaggcgggggccgggaattttgatgggaggaagccatgaacatgaacaggaaggaccaagagaagctgcaggtgtggcaggagcgtctgacgctggcggagaacgccatcgccggggaacgcgagaggatgctccggcgggagcagcagtacgagggcgggcacaccatctacgccccggacggcaccaaggccagggagagccttgccagccatgtgcggaacgtgagctttgagatcatcgaaacgcagatagacagcaccatcccttcaccgaaggtgacggcggtgcgggaggaggacgagtggctggcggacgtgatcgaggccatgctgcgggatgtgatggaccggctgccctcggagcgcatgaacgacgagggcgagagactgagcccggtgcagggcggctacggcctgctggtggactggctggacagcgtcagcgggaaagactggctgggtgatctgaaggtgagtctcgtccacccctatggcatcgtaccgcaggccggcatgacgcaggtggcggacatggatttctttttcctcaagacgccgcagacgaagcgacagatccgaaagttctacggcgtggacgtcaacaacgagaacgagagcgatccgggcgcccggcggctgggcgcatcggcggacaccacggaccagctggtgacgatggtgaccgcctactaccgcaacggcaagggcggcatcgggcggctgcgctgggtgaacgacgtggtgctggaggacctggaggactatcagctccggcgggtacaccgctgcaccgcctgcggcgccgtgggcgacggcaagaagtgcgcctactgcggctccaagaagtttgaggatgaggtcatggagtacgaggagctgacggaggacatcgtgctgcggaatggcgcggtgatcccggcggtgagcaccgtgcgggacgagatgggccagccggtggcactggaggcgggcgtgctgttgccgcagatgcagccgggcggcggtccggcggtggccatgacggaggcggcctaccggcaggagcagacgcgcatcccctactacaagccggacgtgttcccgctggtcatacgcaaaaacgtgagtatgccggggcggttctggggcagcagcgaccttgacgccatctttgaccagcagaacagcctaaacaagctctgcacgaagttgaacacaaaggtgctgtccggcggcagcttcaccaccgtgccgcccggcgcgcagttcatcaccgacaaagacggcgtgcgggtagagctgcagaacccggcgcaggtggagatgatcaagaccttcaacacgcaggtggacatcaacacagatctggccatgatggcgcagatctacgagcaggcacggcagaccatcggcatcacggacagtatgcaggggcggaaggacccaacggccaccagcgccgtggccaaggagttcagcgcccagcaggcggctgggcgtctggagagcaagcgggtgatgaagcgggccatgtatcaagacctgtttgaagccatcttcaaatggatgctggcctactgcgatgagccgcggaccatccggcggacggacgaacacggcgacgtggagtatgtgaccttcgaccgccacgacttcctgtaccaggacgaggcgggggactggcagtacaacacggactttctgttctcctgcgacagctcggcgccgctggcctcggaccggcaggcgctttggaaggagacgcggatgaacttccaggagggcgccatgggcagccccacggagatcacgacgctgctgcggttctgggagcagatggagaagctgcactaccccatggccggggatatggtcaagagcctgcgggatcagatggagagccagcaggcacggcaggcccaacagacgccgccgacggcgccggacagccccggcggcagcggcggcacggaacccacggcggaggagctgctgacgatggcggcacagcagggagggggcgagatggcatgaagtgcccggaatgcggactggagatgatgatctacagcgccacggtgaacgcggacggcggcagcgagaccgcctatgtgtgccggaacccgcaatgtgcccggtacgaccggcggctcagaaaaaagaaggacgctccggcggcggacggcgcggccgaagcgtgaggcggccatccggggccgcggtgggtggtttcgcacgccgcccggagccagacagattttcctcctgtcttactaccggacgccctgccgaagggcggggcatccaccgcagccccggagctgcacaggacaacgtttcgccggcgggacggcgggaaaaacccgaatacggcgaaaggaggacatgaggcatggagaaaaagaaaggctacatcggcagcatcgccaacgtgggcagccagcgcgtggaagcgcccgcccagaaggcagcgcctgcccagaagggcaccgtgcgcttcaccggcaccgaccttcggaccgggaatggcggcagcaaggataagcgcaagtaagcgcgtcctgctggcaccgacgacacatcaccgcctgcgggcgggacatttcgcttggccccggcggaaaaggggcgtattcgcaccgaacgcggaaaaatcggaaaggagaacaccatgaacggattgacggaacaggactatgcggaggccttcggcgtggagctgcccgatgagggcggcgcagcggacggcggcacgcaggagcctgtggaaaacggtaccggcggcgccggagaagaaagcgcggcacagaagccgggcacggaggcccatgaggacggcggagatcctgaagaagcgggaggcggcgcagcagcgccgggcgcggaagcgggacagaacgccgaggagcgcagccggcaggcctacggacgccgggcacgggagcgcgaggcggaacggcaggccctgacagcggcggcgcaggcccgcgtggacgcggtgtatgccgacctgttcgcgggccagacgaacccctacaccggccagcccatccgcacggaggcggacttccaggcctatcaggaggccaaggccagacaggagcgcgaggagcagatgctctccgccggcgtggatccggcggcactgcagggcatggtggacgacgccgtgaagcccctgcgggagcaggtgcagcgccagcgcctggagggcatgagcgctgaagcgcggaacgtgaccgcacaggcacaggcggccatccggcagggccttgaggcggtgcgcgtgaagtacgacggcagcgtccagagccttgaggacatcgtggccatgcccaccggggaagccttccgcggctatgtggaaaaggggttgtccatcgaggacgccttctatatggccaaccgcgccgccgtggacaagcggcgcatggaggcagccaagcaggcgggcatcaagcaggcaagcggcaagcgccacatggccccggtgcccggcgctgcgggtgaggcgccctatgtggccacgccgcggcagaaggagttgtaccgcgagatcaatcccaatgcgacggacgacgagatcaacgccgcatacggagaattctacaaacagtaaagccccgacatggggcgggaaaggagataacaaactatgttcatgcttagcagaatgctggtgggcaatacgccccccatcgtgtatatgcagcccactgacggcgagacctaccaggtgggcgaggcgctgaagctggccagcggcaaggtgacgctgtgcagcggcgctgtggcgcccagccatgtgtgcgtgggccccatcgacgacaacggcgtggtgccgtgcgtggaggtgcagaagtacatggagttcgagaccaccctcggcgtggcccccgcggactccgcgaccgtcggcgtgggcgacaaggtcaccctgcacaccgacggtatgcaggtcaccgccaccaagaccagcggtgtggcagaggtcaccggcatcgacggccagaccgtcggttcccacgtgacggtgaagttctgagcgaagaaaggagatacataacatgagtggttttctgaccgtttctatcggttccgggctgaacgggaccatctacggcgattgccaggtgccgctgaaggcatttctggagagccggggcgaggcgttccagcgggagagcctgctgccctatctgtaccgcatggaaaagagccgccactgggcggagcgctattccagcgagaccgccatgggcgacttcgagcccgtgggagaaggcggcgattatcccaagaccggctttgaggatggctacttccgggacatcgtgaacatgacgttcaagcagtccttctccgtgacaaaggagctggtggaggactgcctgctgggcaccatgaagcagcgcgccaacaagctggtgaccgcctacggccgcacccgcgagaagttcgggcgtatcctgtacgctggcggcctgtacggcaccaccgtttcctacaagggcaagaccttcgcctgcggcagcgccgacgggcaggccctgttctccaagacccaccccaacaaggtcgacggcgccaagcagaccaacctgtacaagggcaccttcaccaacaccctgttgggcaagatcgagaccgagatgcagaacatcaagggcgacaacggcgagctgctgggcgtggccccggacaccatctggatccccaacgacggcgcgctgaaggacgccgtgttctccgccgtgggcgccgacaaggagcccacctccggcaacaacgccttcaactaccagttcggccgctggaacatcatcgtggatccctacctgaccgccgcgctggccgacatgggcaagagcagcgaaaagcccttcttcctgctggacagcaagttcattgagctgaacgacggccccatcttccaggaccgcgtgccgctggaggtcaagtccatcatcgacaccaacaacgacaacaacgtctggcagggccgcgcccgcttcggcgccggtttcgtggactggcggttcatcgctgcgggcaatatgtccaccggcaccgacctcacctaagaggaaggcggtggcggcatgacatggggagatgtgaaactggctgcactgcagaccatgtactccaacgagggcgctgtgctgacagaggacgacatcaaccgtgagtatatcaatgccatgcccgccaaggccaacgaggcgctgcagcagatcgcgtccgttggccgccccatcctcaagtcgtggcagatcgagatcgacgccgacaccgacgagccggtggtgacggcggagaagctgatcctgcccaagacaaaggacctttacaagatacccttgcaggactacctgccgcgcttccgctgcctgaacagcagcgaggtcatgttcgccgacggcaccgcctacggtaccgcggaggactggagcatggagggtgacgacgtgttcgtcatccccggaagcgtggtgggcacctatacgctgtggtacaaggcgtacccgcagaccgtcacggcggacacgccggacgaggaggagatcgacctggcggcggaggccgctgtactgatcccgctgtacatcgcggccgagctgtacaaggaggacgatatctccatagcgaccatactgcggaatgaatacgaggacggtcttgtgaaggtgcagacggcttacgcatccagcggatcgggcatccggtccgctggtgttcgtaatacgacagggtggtggtaaggtatggcacaattcacggtaccggcggcaagcaagaagtacagcatagtcattgaggcgttccggggcgtggacctgaacaacagccccagcaacgtggacaagtcccggtccccggaggcgcccaacatgatacgcgaccaggtgggcaaggtccggaagcggaccggctacaccacgatggtaacagcctacggcaacgcggccatcaacggcatccatcggctgaacggagaggtactggtccacgccggcgggaaactgtaccggcggaacatcgacacggacggcacgtggacgctggaggtcataggggacatggcggacgccaggagccgcagcttcgtgtttgatgagaagctgtatctgctggacggcagcgtgtaccgcgtctatgacggcacgacgctctcggcggtgagcgacaacgccacggtgccgacgatcatcatctcccgccgccccaccggcggtggaacggcctatcaggggctgaacctcatcggaaagaagtggacggagagcttcctcggcacgaaggatgccacggtgtaccagctgaccacggaggggctggacagtgatcctgtgacggcagaggtactgaacagcgacggcgaatgggtggccaaggtggaaaacacggacttcaccgtggacaggcaagcggggaaggtgacgttcaacaccgcgccgggcgagagcccggtgaccggacaggacaacgtacacatcaccgcctccaagacgcgggaggggtacgcggacaccatcaaccactgcaccatcccggcggtgtacggcgtgggcggcgccacggaccgggcgtttctcagcgggaacagcgaaaaaaagggcacggacttctacagcgagttcgacgatccggcctttttcccggacaccaactacaccaagatcgcccgcgacggcggcgaggtggtgggctacaccgtactcagcaatacgctggcggcgttcctcaccggcagcgccgacggccggaacgtggtggtgcgtaccggctcgctgaacgaggacggcgaggcggtgttccgcatcaccaacaccatcatcggacaggacgcggtggcgccggacaccttctgccggacggacaaggagccgctgtttctgacggaccgcggcgtgttcgccatcacggcggaggagctgaccggggagaagtacagccaggaacgcagctactacatcggcagcgccatccgcgaggcgggggaccgcggagcggccagcgcgtgcatctacggcgacttctacgccatggcgctggacggcacggtgtatctgctggacctgcagcagaagacctacgagaaaaacagcccctacagcagctttcagtatgagtgctactacttcccggacatcccggcctgcgtcatgttcacggacgaggacggcgcactgtgcttcggcacggcggacgggaaactgtgccggttcgcgtcggatccggacagcccggccagctacaacgatgacggcgcggccatcacggcgtactgggacactgcggacttcgacggcaacctgttcttccagacaaagtcgttcacaggtgtggccgcccggctggcggcggcacctgttaccggcgtgaagatctacgcgctggtgcggggtatttggaaacaggtgtacgacgccaagagcaaggcccggtatctgagcttcgagtacatcgacttcggaaagttcaccttcagcggagatcagacgccgcgcacgctgtacggcaaagtgaagctgaaaaaggtggacaaggtgcggttccggctgcggaacgacgaggtgaacgagcccttcggcctgtacgccttcggcgtgcagtacaaggaaccgggcaccaactacaggagataaggcggtgaacacatggtactgagcgatttcaagatcacggatgccgacattaccagtaaaggcgtacaggcatccccggaccaactcagcggcacggctgaggaaaacaaaaaggtctttgaccggctcacctccgggccggtgagggacgggcacaacaagctcatcgacgcgctggtcgcgctgggcgtggagcagctcatccagtacggcagcgaggacatcaagtatatccggctgaatgcggacgagcacatcgaggtatcctcggacggcgcgacatggacggaggtggcctcgtccgggcacctgatctacgacgcggcggggcggcagatgccgcagcggagccggctaaagttcggcggggcaagcgtggtgacggacgacggcacctacaccatcgtatccggcgtaaagggcgacaagggcgataccggcgcgaagggcgacaagggcgagaagggcgacaccggcgaccaggggccgcagggcgcggcatggtatccggcggtggacggactgggcaacctgacgttcgtactgagcgaaacggccacgccgccgcccgcctacaacatccgcggcccacagggcccccagggcgtgcagggtttgcagggtgccgcgggcgccaccggcccgcagggcatccagggcccccgcggtttgcagggcgccaagggtgaaaagggtgccaccggcgccacaggtgccaccggccctgccggtcctgccggcgcgcagggcgcacagggcatacagggcccgcagggcgagaccggcccgcagggcgcgaccggtgccaccggccctgccggtcctaccggaccgcagggacagaagggcgatcccggcgaggacggcaagtccttcaccattcaggacatctacccgacgctggcggcgctgaagcaggcgttccccaccggaaacgagtacgcctaccaggtgacggcagagaatgacgagatctttatatggtcggagctgtccacggactgggtgagcctcggcaaacttcagggaccgcagggaccacaaggccccaccggcgccaccggcgcacagggtcctaagggagacaccggcgctcaggggccgcagggcgtacagggcatccagggtgcaaagggagacaccggcgctaccggcgcgacgggccccaccggccctaccggcccggagggaccggaaggcccccagggcccccagggcgagaccggcccccagggcgagcagggcatccagggcccgcagggcgaggcgggcgagagcgcctacaccgccgccagcaagggcggctacaccggcacggagacgcagttcaacagcgacctggccaaaatcgggaacaaggcggacaagacggcgcccgcggcggcgggcaacctggccacgctggacgcggcgggcaatctgtccgacagcggcaagaagcccgctgactttcaggccaaggtgacggccagcggactgctgaagggcgacggcgccggcggcgtgaccgcggcggcggaaggcacggattactccggccccaaggccacggtgacggccacgctgctggcgtccggctggacgggcagcgaagcgccctttgtgtacacgctggccatcgccggtgtgacggccaccagctaccaggagctgctgccggcggtgaacatcacggcggagcagctgaaggcattgcaggcggccaacatcacggacggcggacaggcggcgggcagcatgacgctgaaggcctacggcaaggtgcccaccgtggacatccccatccgtgtcatcaaggagggagagtaaagaaatgcctactatcattcgatttggcggcggcgccggggacggcgcgcagaagttggtggtgaacgtggacagcggcgccacggtgactgccaaaaagggcagcgtggcggtgagtgccgtcagtgagaacggccaggcggtgctggagctggacgaggcgggcacctacacggtgagcgccagcaaggatggcaccaccacgccggacgtgaagacggccacggtgccgcaggagcttaccctcagcttcgtggcggcggagctgaacaccaacagctgggagatgatcaaggcggtatcggatgccgggcagggggccaactactggtccgtgggcgacacgaaggacgtgacgctcaccggcaactggcaggacctcatcatgtccaatgtgaccgtcaaggcgttcatcatcggctttgaccataacagcgctgtggagggcaccaaccgcatccacttccttatgggcaagatcggaaccaagatggtggccttctgcgacaacctgtacgaccacaagaccagcggcgcgtacttcaccatgaacaccacggacaccaactccggcggctgggaggcctcccgaatgcggaatacggtgctgggcaacagcaacacgccggacaaccctctgcagggcagtctcatggcggtgctgccggaggacctgcgggcggtgatgaagccggtgacgaagtggacgcagaacaactcgccgttgatggcgactgccaccacggattacacgttcctcatggcggagtttgagatcttcggcgcgcggacgtatgccaacagcgacgagcaaagtaagcaggcgcagtacgactacttcaaggcgggcaaccccaaggtgttctacaagcactcggcgaccaccacggcggtcattgcctggctgcgctcgccgaatgccagcggcagcgcctatttctgctatgtgaacacgtcgggcgccgcgaacaccaactttgccagcttttcgcgtggcgtcgcccccggcttttgcgcgtgatcgggcgaagcccggcatcagacagactatcccccggcgaaagccgggggagcgaaaggagaagtatccaaaatgagcgtaccggcctataagagacagaagccggatccgaacaacccgcgggatccggagttcgtgctgctgagcaagaagctgtatgtagaggtcatcgacctgctctcgtgcatgagcgcacggtacggccggctgatcgccgtaccgacggcggagctggccggggaggtacaggactacgccgtgaaggccaacgacgtgttccccagcgacgggcagaagctggcgctgcggcgggagtacctgctgcgctgccacgctgcggccaaggcgctgggcgagcgcatggacaaggtacatgaggtgctgcggtccaacccggagggcgccttccgcaacggcaagggcgttacgctgggcgccgaggcggcgctgaagaagctgcaccggatggaaacggacgtgggcgccgactgcgtggcgctgcgtaagaagctggaggcggtggccgacagcgacaagcgccggtatctggcgcaggaaaagaaaaggaagtcataagagtatgggtgtgtctctgaataagtgccccgtcgtgttgagggcgggcggcggtcaatgcctggctgcgctcgccgaatgccagcaacagcaacaatttctgcaatgtgaacacgtcgggcgccgcgaacaacaacaatgccagcaattcgcttggcgtggcccccggatttcgtgccccctctacgcttggagggtgagcaggtcgaacagcaacaggaccttgcgcgaaaggagaggcacttcccgcgacggcgcacgccgtccgaaaccgtcttccgcaccgctgcacggacgcttgctggaacgccaaggaacggcgttccggcacacccgccgggactatggcgggcgcttgcatggcggagaatgtgcctacctccgtttcatgtgccgcgggagagcagagaacacgccgggcggcacggcccgacgctgccgggagactaccgtatgacaagcgcggagcgccgggaggggcgctatcaacgacggaaggcacggcggcaggagcgcaggcagcggcgcatggcggcgctgggcacgatagaggacatcgcccggttcgaccggatgtaccaatgcggaaaggactgctgccggggcgtgcggtggaaaaccagcatacaggcctttgaggcggagctgtttatgcggacagcgcagagctgccgcctggtggaaggcggcgcatggcacccgcagcggaggccggtacacttcaccgtgatggaacggggcaaggtacggcccatcgacgcgccccatgtggacgacaggcaggtgcagaaggcacacagccggtttgtcctcgcgccgtgctacggccccgccatgatctacgacaacggggccagccagcagggcaagggcctggagttcgcctaccggcggctgaaaagggcgctgatgcggcactaccgccgctatggccgggagggcagcgtgatcctgtgcgaccttaaggagttctttccctcggcgccgcgccgggcactgctggaccgccaccggcggtatatgccggaggggcccatccgggcactggcggacgagatggtgctgacggcaccggagactgagccgggccggggtatgccgctgggcatggagcagagccaacaggagatggtggctctgccgtcggcggtggacaactggctgcggtgccagatgcacatggaggcgcagcactacatggacgactatgtgatcctggtaccgccgggcgtggacgcggcggcggtgctggaggcgttcatcgcacggtgcgaggcgctggggctgcgtgtaaaccgcaggaagtgccgctatgcgccgctgcggcggcccttccgctactgcaagacgaagtttcggctgacggaaacgggccgggtggtgacgcaccgcaccggggacgcacagaggcgctgccggcggaaaatgcgcctgctggccgccaggggcgactgggagggcgtaagggcgcagatcgtgagcgccaagggctactacaagaggcacaacgacaacggacgcttgacagcgctgcgggcgctgcacagcgcgctgcgaaaggagagggcagcatgaggtatgtatgtcacagacgggcgcggttcgagggcatatccggcagggtgaacatcccctacggcgccgcgctggagaggcggggcgacttcctgtactaccagggacggcagctctgcgcggccgggagccagcgggcccatgagcatttcaagcgggacgacgatgggcagggcctgcggcgcggggcgctgacggaggccatctgcaagacgctggagcgccggggcgccgggcaccaggcccgatgggaccgggtgtgggcggacaagctgtgcgggaagtaccggcacccggaccacgaggaccacttcctctggggcaacgccttctttgaggcacccatcgcagatctgaactacatcgccgcgctggtgggcgcgggaaaggagcgctagaccatgtatgtattcaaaagggacggccaggaggtggccgcgcaggaatggccggtatgggtacagctgcaggaaaacggctgctacggcctctgtaatgccgctgacgcgcaaggcgtcgtgctgggcggggtggtatactccctgagcaaccggacgcccatggagggcacggaggaggtcgcggcggaagtcgtggagagtgtgccgtacctgcgggagaaggtggacgcgctggagagccggctggccgtgcagacggcggccacagaggtggcctttgtgacgctggcggaggcggggaccatcgacgccgtgacggcgggagaacaccggacgatgttcgccgcgtggaccgcaggcgtggcctatacggtgggccagctccgcaactacggagagaagctgtaccgctgcgtacaggcccacacgtcccagaccggctgggagccggacaaggcagcgtccctgtgggcggtggcggcggatccagcggaggcatggccggcgtggagccagcccacgggcgcgcacgatgcctacagcgccggggacagagtgagccacaacggcaagcactggaccagcgacgcggccaacaacgtgtgggagcctggcgtgtacggctggacggagaacgccgatgggtgagctggaggtcattgaggcgctgtgctgcctggtggaacgcgccgtggccgtgatacgagatgaacagacgaaggaagcgctgctgcgggagctggacgctgccacaggggcggaggacatgacgaaagcgccctgaccgggcgcggaaaggagcgagacatgaaagagactatgaaccctattgctgcggtgacggccgccgcgctgggcgtgctgagcgcctatatggtgcagctttttatccccctgatcgtgctggtgatcgccatggtggtggactacggcacggggatggccaaggcgtggtctgccggtgagctgtgcagccggacgggcatcaaaggcatcatcaagaaggtgggctatcttgtgatcgtgctggtggcgatgggcgcggactatctgctgcgctacggcatggagcaggtgggcatccacatcaacgtggatttcctcatcgcagctattgtgatcgcatggctgatcattaacgaattgatctccattctcgagaacgtggcggccatcggcgcgccggtgccgaagttcctggtgacgctcattaaaaagctgaagaacgttaccgagagccacgcggagactgtggcggcggacacggagggcgcgaacgatgaaaattaacgaggtggactacaagtggaacggctcactgatgaagcgggccgccaccacgcggatcatcctgcaccacgcagcggctaaaatctgcacggcgcagcagatccacagctggcacctggccaacggctgggtgggcatcgggtaccacttctttgtccgcaaggacggctccgtctaccggggccgtccggaggacacggtgggcgcccacgccggcaacaacaactacgacagcatcggcgtgtgcttcgagggcaactacatgacggagaccgccatgccggaggcccagcgggcagcgggcgcggagctggtggcctatctgaagcagaagtacggcatcacgaaggtgcagaagcaccgggacgtgaacgccaccgggtgccccggcgacaacttccccttcgaggccatcgcctacggtacgccggaggagccctgcgtgaatatcacgctggcgctgtatatgctggccaagggcagcaagagccagcaggtgaagctgctgcagcggacgctgatcggctggggctacagcgtgggcgtatacggcgcggacggtgatttcggcgcggccacggagaaggcggtcaagaagttccagacagccaacaagctggccgttgacggcatcgtgggcaaggacacatggacggccctgctgaggacgtaaggaggtaagggatatggcaaggtacaacggaaacatcatccagaccaccaataggaacaagaataacaagaccaccggtaccgggaacaacctgggaggcaccaaagccgggggcagtatcaacggcgcgctgaccggcgctgtctccggcagcgtgggcaccgggatcaagggcggatcctccagcgggggcaagggagcggtctctgcgcctccgggctataagaccgtacaggtggggcgtcttaccggcgtagcgaaggatacgagctcctccggcggcactaccaaaagcagcggcagcagcggttccggcgggagccttgccggcggcgtggccggggccatcgccggtgcggtgaaggatgctgctaagaacgtggcgcagggcagctactccggcgggagctacggtggaagctacggcagttccagcggctcctccggcagcggctacaacaacggcggcctgagcgctgaccaggtccggcagatgcaggaatactacggaaccaccgcggacggcctgtggggcgcgaattccaaggcggcagcgggcggcatgagcgccgccgaggcgtggaacgcctaccgggaggcactggcgcaggacgagctgaacggcgatatgtcgtgggagaacttcctggaccgcatgggcggcaccgactatgagcggcggctccgcgatgccgtcaacgcgcaggtgcagcaggccgtaaacgactacaaccgccagatcgagcaggcgggcaccagtcatgaggaagcggcgcgccgggcgtacatcaacaaaatgctgtcccagcggaacatggaacaggagctggcggcaagcggcgtgtacggcggcatggcggacagccagcggatcgcggcggaggccgactatcagaacgacctcaccgaccttgagacacagtacaacgacacgatggcgcagctgcggcaggccatcacggcagcccggctgtccggcgacgcgcagatcgcggagcagatggcaaactacctcagccaggtacagagcgagtaccggagctatctgcaggagcgcatggctgcccgccagcagtccgccggcggcaccgcgagctatcagtcctacggcggaggcggggtggccacgcaggagcagggcagcgccgcaggggccggcaccggcctcggcaattacaacgccgtgaagaataacatcatgctgtacgcctcccgcggtatgaccggcgtggccaaccgccttatccagcaggcgtgggggcagctgagcacggcacagcagaacgacctcgcggcgaccatgaggcagaacggctggacaagctgacaggagggctctatcatggctaagaagtctatggctatgaccatcaccgaaaaaaagaccaagcagagcaaggcaggggcgcgcattgcgtccctgccctctgcgcttcctgcgctgcagatgccgaagctgaagactccggcaaagacatcggggacgcagatgcccgtgctggggaaaactacgtccaagggcgtgcagtccgtggcgaacggatccggcacacagagtggcgggagaaccacggcaccgaaggtgaagaccgtgaagccggcgcagcagtcggcgacagaccgggcggcgaacattcgcgcattcggcgcgggtgactactccggcggcggggagctgctggaaaagacgtacaagaccgcacgcgccgcggtaaagggcatcggctcctcctacgccaacatcggcggcagcatcgtggagggcatgggcaacctgcaggagatcatgcagaaaggggaaaacgacaacaagatccagcagatgaaggacaccaaggccttctatgagcaggctctgaaaaccggcgtcaaccccaacaccggcaagaggctgacggtggaccagaaaagccggtactacaagatactcaacacgcagtacaccgacggcaagatcgccgagatggagaacatctacaaggacgccacggcgagccaaaaggcccggacgatggagaccgccaacgatgccttcgccgcttcggaccgcctgaaggccagcgccgacaaggacgtggccgccgccaaggagggcagcggcaaggtggggcaattccttgtggatctgggctacaccggcacgcagctcctggccgacctggcggcgaactacatcgcgccgggtgcgggcatggtatccatggccagccgcgtatacggcgacgcctccgccgaggcccggcgggagggtaagacagccgggcagcaggcattgtccggcctgaaaggcgccaccattgaggtgctgacggaaaagctgttcggcggtctcgccaaggcttacggcgccggtacggcggacgagcttgtggaaaaagtggccgacaagctgaccaagacagaagcaggccagcgggccgctgtgtggctcatcaactccggcggtgaaggccttgaagaagtcgtttccgacgtgttgaacccgctggcggaccgggcgctggggctggacgacggcaccggggccatcttcacgacggacgacgcggcgcagatggcctatgatttcctgctgggcggcactatggggcttatcggcagcagcggtcagctgcggagagggcggacggtgcagatgccgacgctggagcgcacgcaggataccagcacggcggaaatgccgcagtttgccacggaaccggcggcacaggacgcgcagacggcaccggtcgtaaactttgacgccgaaacgcagaacgccgcagagaggcttacagagccgaatacggcggcggggaaaatcaccatgccgcgggtgacggacgccgcggggaatacatacgcccagcggcaggcggcggcgacgttcaacgacggctccaagagcgacgcagagggcgttcttggcctgctgcggtccaatatccctgcccttgagggcatagagccggtggccaatgtgaccggccaagaggtggggaaaaccggcagggccacagaccgggtgtataacttcttccagagcatcggcgggaaggtgcgccgcgaaggcttcggtgacgtgctgttctccaaaagccgggtgagaaacagcgtagtcggacacggatcgggagaggcaaagatccaactggcggcggccgtacccggcgtaatagaaaacggtgtgcagatcaactacacaccgaactggaaggggagagggtacgacagctatgtgtttgccgcgcctgtgacctatgatgggaaacagacctatgtgacagccatcgtgacaaaggatgatgcgaaccgctattatctgcatgaggcgctggacgcggaggggaatgtgctttataaaaaagcagagggctacgacgccgcctccgataggcccacagcaacaccgcaggacactatagctgacatcgagccctctgttgatagtatagcacagacggagggagctgtcaacgaggtggagatgccggtgataggggagagtgcaccgagcgcatttgtgcgggacggcaatatcatccggcgggatacctctgaggcgacgccggcagatgccatgacgtggcaggatgcgtacaactacgagagccgcagcgacgcaccggcagaggtgacacaggagcctgtctccgcggcagaccgggcagagatggatgcctatatggacgcgctggcgcaggatgagaacatcctcacagatgatccgtacacgccggcggatgccgtgtatgacgcgcagctccgacggctggcggagagcgaagcacctccggcagcagaacaggagcaggtcctgcaggccgacctcgacgagctggccagcctgtacgccgaccaggcggacgtgatcggccgcagggagtacctgcaggacgcgacctctgacatggttacagacaggaccacgccgaaaaagcagagcaagcgggaggctgcccgcgaagcgtgggatttcttctaccgcaagatggtggatgccgggcacagcgtcacgaagctgtccgaggcggtcggcgatccgtacctgtatcagttctacaaccaggcacgggcgtcgtcctctgccggggtgaacatgatcacggatgcccagacggacgtgaggggcaggaaggtgggggacagcctcaacgatgtgttctcgcccatccgcgcaagaggggaggacctctaccacgacttccagctctatatgttcgacctgcacaacatcgaccgcatgagcctctccgaaggaaaagcggaaaaggtgctggaggcgaaggcggcgctgcgcgacttcgacaccgaaaatccggacatccggacggacaccgccgcccagcttcaccggctgacggaggatccggatccggacatcgcggcgctggcgcgtgagagggagaggctgctgcggaatttggacaaggccgaggccatccaggacaagccggtgttcgactatgaattttccgcagaggacagccgagcccgcgccgagaagctgctggcgcagcacccggagttcgcggagtaccaggcacaggtacggaagtacatcgacaacatgatgcagtaccgggtggacagcgggcttatgacacaggagaacgcggacttcctcaaggagttctatcccaactatgtgcccaccatgcgcgtgcaggacaaggacgccgcgggccggggccgggatctgaacgcggtgcgtatcggcaagacagtgggccgcgcacagggcggcacggaacgccttgtgccgctgcatgaggcgctgggcaagcagacgatgaaggtcgtgcgtgagggaagcaaaaaccgcttcgcggaccggctgctgcgcgactatctccggacgggcgacacggacgcggtaaaccgctacgtcaaggaggcaagccagtacgagcatgagttcaacccggagacactggacgatgccgccatcgagaggcccagcaaggacaagatcgtcacggcctatatggatggcaagctgtgggaaatgacggtggacgacacgctgttcgatgccgtgaaagcgctgtcgccggatacggcggagagcaacaagctgacgcgcgtggcccgcggcgccaacaacctgttcaagtcgctggtaacgggctacaacccgacgttccttgccaggaacgtgatccgggacctgcagactgcgggactgaatacgcgggacgctgcggcgtttgcgcggaactatccgcgggcactggcggagataaagaacaacggggaatactggcagctctacaaggcgctgggcggcgtctactcctccgtgttcgactacaccaccggcaccatcaaggagccgaagggacggatgggcaaggtgatggcgcgtgtggaggcgctgaacatggcggcggagcaggccccgcgtctggcggagtttatgggcgtcatgcaggaggcggaggccgcaaaacagcgcggcgaagcggtaagcgacctcgcggccgaggcggacgcgctctatgccgccgccgatatcaccgtgaacttcggacgctccggctcgctgggcaaggtgctgaacgccaactatgtacccttcctgaaccccggcgtgcaggggcttgacaagctcgtccggcgggtgacggagaccaagggcgcaaaggagtgggccaagctggcggcgcgggccgtggcgctgggcatcgctccgtccctgctgaacgcgctgctgtaccacgacgatgacgagtgggacgatctgcgggacagcgacaaggacacgaactatatgttcaagctgggcaacggctactggctgaagatcccgaagggacgcgaactgtccctgctgggcatcacggcggaccgcgtggcggatgcggtgaggggggaggacgtggacattctctccaccatcaacaccatgggcaaccaggtcgccccggcgaacccgctgaccagcaacatcttttccgcgctcatcgactcccagctcctcaacccggacagtccggggcggacgtggtacggtggagacattgagagccggcgcctgcagaactacgcaccgggcgagcgctacgacagcagtacggacgtgttctccaaggccgtgggcaaggcgctgggcatctcgccgaaaaagctgaactatgtgctggatcagtacagcggcgtactgggcgatttcctcctgccggtgctgacaccgcaggccgagcgcggtatgtttgaaaaggccttcacggtggacgtcatgagcagcaaccgcgtaagcggcgacttctacgacgaggccaacgaactgaagtatgccaagaacgccggcgacgtggcatccggcgtggtgagccgctggtggaacaagcagcagaccgcctgttccgacctgtggaaacagatccgcgaggtggaagcgtccacggagctgtccgacagtgagaaaaagcagcagacgcgagagctgaaggccatcgtgaccggcatccagaaaaacgccatcgcgcaggaagacgtattccgcgccgctgtggaaagccaccttgcggccggagaggatgaggacaccgcgtaccgcgaggccaacaaggactgcttcggcgccgagtacgccctgcaggtgtacaacaaggatgtgtacgagagagcgcgggatgcgaaggagaatggcgtgccctatgacgatttctatacatactacttcggaacaaagggcatcaaggccaccagcacggagagcgccgtgtcccagaagttcgactacctgcagcggtccggcatcagcgaggaagcacaggcggagatctatttcgcggacatggccagcgacaagacgctgctcacacaggccgagctggaaatgtctgcggggatcacggcgacgcagtattacaactacaaggcggccacgtcgtccatgagcaagaaggccgagaagctggaggtcatcgcggccatggatctgacctccgagcagaaggatgcactctactactcggaagggtgggccgagagcaagatctatgaagcaccgtggcgctccggcagatccgcgggcgtgtctatgccggtgctgggcggcagcggcgtgaccatgcctgtgctgggtagccgggaaagctccggcgtacagatgcctgtgctgggcggcggtacggtgaaaatgccggtgctgaagtaaagaagggcgcgaggaatgcctcgcgcccttcggttattcgtttgcgattttgacaaaggcagcgttgacagcgggaactccggtgggtataatgggcatatcttgaatgggcgggaggaacgcgatatgctgaacgaaaaagatatgcaggcgatatcggagttggtagacgagaaaatcggcgcatcggagaaacggatgtctgagatgatcgacgaccgtatcagcgcgtcggaacggcggatgcaggtgttgatcgaaaacactgtggcgcccaagttcgatctcgtgatggaggccctggacggcatccgagaacaactcgtgccgcgctctcgcgttgatgaccttgaagatgaggtgaagttcctgaaggtcgttgtgcggcaaatgtctgagcgcatggccgcgctggaaaaggccaactgaataaaatagagaagccggagagctgaggctctccggctttgtgcttgcgagattagttacccaggactggcatttcagcaatagaacaggagggacacgttttataccccttacctgcggcaagctctgtgttgaatatccagtatccggccgacaggtcacatttcgagcaggtgggatcccggtgatacatacggcccccggtaggaactacacaggcgttgtctgcgtaaagagagagggcgtcaagctcgtcccgtaggcgcttgacggtggacgtgaggttcgatatgctggtgcgcgcgttggcgttgttctcctgggtatcaagcaaggcagcacggcactccgagtaagagatctcccgtgccacgctgatagccagggaagcaagcagcgcgacggaaaggacgatgactgccacagaaggcctgcgcttgcggcgcttcttaggggctacggcacgccggggatcatagccgcaatcgcaaggggagccggaatggtttagacagccgcaggccgggcaggtataccatgtgtccgtgatgggctcgtcctgcacctcggtatattcgacatcgacaaaatccatagcgatacctcctttatggcattagaatagacgaggcatcgggatttgtcaaatgctatgaagcgaaaacgagaattttacgttgcactttcgtagtctgttggtgtccgggccaccatactgactgataatgaccgctgccagcttggggttgggattcttgatcttcacagggtattgcagctttttctcatagacaaacatggctcagttcccctttccatcccacggccacgggtcgttcagccattggtagctgcccggcgtgatatccgtctgcatcaacggtccgcacttttcctgatagcgtttacgcccctcctggcccagccggatgtatgaccagtacagctccaaagcctgctggtcatctgcgtgtgtggtcaggtacagccccagctcatcaatggcaaaatccagcgccatcagctccagcaggggaccgtctacctgtggaaagcgggaccgcaactccttgtggaagggaagatcaaggccgggaaagagtgtgccctgccgcagggcctcctggtcgtcgtagcgcacggggtctgtaccctgcatggccacataggggaaagccagcgcaccgcaggccggaagctggccggtaccttcgccgcaggcgggctgtgtttccgcccgcgctgccgccgttttctctgtatacaagagaatttcctccttttgtcggtagtggagccgttcacagcggctcgctatatcttatgccttggcggtttggacggtgaagaaaatcgttttcaattttgctatgctgtgttacaatgaagaaaacacacataaactctcccggaggggagggaggtccatggtgttgctgcttcgcaaacgacatctgctgacagttgtggccgcggcagcgttgtgcggtgcactgctgctgaccgcgcgtcccggggcggcggccgtttcgggcagcgcttcgccacagcgggcggtcatcttggatgccggccacggcggcgcggacggcggggcggtgtcggacagcggtgtggccgaaagcggcctgaatttggccattaccctgcgcctggcggatgtgctgaccttctgcggctatgaagtgctgctgacccggacaggggaggaggccctatgtgacgatcctgccgctacgctgcggcagcagaaggtatccgacacgaaaaagcgtgttgagatcatcaacagctgcgctgacgcttggctcatcagtatccaccagaacagcctgccgggtcatcccggtgtcagcggtgcacaggtcttccataacggacaggacggtgcagaagcgctggcgctgtgcattcagaacgatctgaatatggctgttaatacccgggaaaaagcagcaaagcgtatcgacgacagcatttacatcatgaagcatgcggactgccccgccgtgctggtggaatgcggatttctgtcaaacccggaggagacggtgctgcttcagcagccagactatcaactgcacatggccgctgccatcgcagcgggtttttgccaatactgtacaaatgagggatgaaatatgaaggctaagaccgtgtttttctgcaccgagtgcggcagcgagagtcctcgctggtccggacgctgcacggtgtgcggcgcatggaattccatggtggagcaggcggcggagcgtccgtccaaaaacagcaaaatgtcccgtgtaaatgcgcctgtaaaggtatctcgcattacggatatgcaggcggacgaggaaatacgtttctccaccggaatgggtgaactggaccgcgtgctgggcggcggtgcggtgaaggggtcgctggtgctggtgggcggcgcacccggtatcggcaaatctaccctgatgctgcagatatgccagcagttggggaagtttgctaaggtgctgtatgtatccggcgaggagtctacccgtcagctgaagctgcgggcggagcgcctgcgtgtggacagcgaaaacctgtttgtcctgtccgaaacgcggctgggtgatgtgttggagtgtgtacagcaggagcagcccgacatcctgattgtggattcgatccagaccctgtataacgaggaactggacgcacccgccggcggcgtgggacaggtgaaggactgcaccatggcgttgatgcagctggcgaaggggcagggggtcacggtatttgtcattggccatgtgaacaaagaaggctctatcgccggacccaaggtcttggaacacatggtggactgtgtgctgtacttcgagggcgacaggcacatgacataccgcatcctgcgggcggcaaaaaaccgcttcggcgccaccaacgagatcggcgtgttcgagatgctggacgccgggctccgtgaggtggagaacccctcagaaatgctgctttccggccgccccgccgacgcctccggcacctgtgttacctgcgtgatggagggcgcgcggcccgtgctggcggaggtgcaggccctgctggcgccctgtgccggggcacgtcccatgcgcagcagcaacggctttgactacaaccgtgcctccatgctgctggcggtactggaaaagcgtggcagcctgaaagtcagccagtgtgatgcctatctgaatatcatcggcggcttgactttggatgagcctgccgccgacctggcggcggtggtagccatcgcctccagttatttggataaacctgtccccagcacgatggcggcgataggggaggtaggtctttccggcgagatacgcagcatcacccacatggaacaacgcctgtcggaagtaaagcgtttaggctttacgcaatgcatggtgccagctcacaaggtcaaagatctgaaggcacccgttggtttggagcttcttccggtggcgaatatctcccgggcgttgcagctgctggctcggggacaataggcacataatggaggcaagggtgggaagcgcttggttggccaatcgcgttgtcgcaggtgtccagcgtgcacacgccgtcctgctgccagcgacagctgtcgatgcagggtatcataccatcactcctttgccgtagtttggcctatcatacgtcattctatgaaatcaactgttactgccgcgtaacccttttgtaattgacatttttttgtattttgatatactttctatatagcgagatgcagcaatatcggtatgtatcggtatacaaggaggaacaaatatgaaacgtaaaagtctcttcattgttctatttgttgtggtttttgttgcggtatacatgatcatgagctttgctatccccggattccgcatcaaattagaggcggagccggccgtggtctttgtggaaacgctgaaaatcctctggccctttaaggcagcagtctccctgatcgcggcggtacttgtcggcggtctgccgctggtactcggaaaacggaaataagaaaaagcatcccccggcgcatatgccgggggatgcttttcgcttattttttcttcttgtcaatgggcttgccgtccatgcccacgggccccttgccgttgatggcgcggtagtggttcagcttgtccacgcgcttctggcgcttaagctgcttttccttctccttggccttttgagcggcagcttttttgtctgcctcttttttcttgcgatactcggccttctgcggatcttcgtcttccaccaggtccttgtacttttccggatggcgtgcccagtcgatgcggtagatcgtcagagatacaaataaaatcgcgcccacggcgatcatcccgtaaaaaataaaattccagaacatggtcagcagcgccctcccaaacctattttgttcagtataccgtaaaattggcggcaatgcaagtagttttacaaacatggagaaggccgtgtggaattttcggttgttttttgcgccggcagggggtataatgggcccgtcaaaagatggtttccggggaaatgggagccaaaaacggaggtaaaaggaaatgtttacatcttttaaagaattggaagcctatgtactgggctgcggcatgaagaagcgcatcgcgctggccaatgcccacgatgaaccggcgctgagcgcggtggtcaacgcccgccgcaagggcgttgtcgagggtacgctggtaggtaaaaagaatgagatcatcgccatgctgcatgagatgggcgagagcgagaaggactatgagatcgtggatttcgatggcgaggagctggacgccgcaaagctgacggtgcagctggtgcgcgagggcaaggcggatatccccatgaagggtattctccaaacctccaactttgcccgcgccattctgaacagagagacgggactgatccccgccagcggcaagcgcctggtgagccagtgcggcatcttcgagtacgagggccgcttcgtgatgatcaccgatgccgccatcaacatcgcccccgatgtggatacccagatcggcattgtggagaacgcgctgcctgtggctaacgcgctggggatcgagtgccccaaggtggcggttctgtccgccgtggagaacgtcaccgagaagatgccctccaccgtttccgctaaagagatcgcggagcgcggtgtgcccggctgcatcatttccggccctctggcactggacggtgctatttccatggagtccgtgaagcacaaggccatccatgatcccgtggctggccaggcggacatcctgctggtgccctatatcgagatcggcaacgtgctgtataaggcctgtacctacatcgcctgcaagaccatggccagcaccatctgcggcgcatcctgccccgtggtcatcaccagccgcgccgacacccccgacagcaagtattactccattctgatggccgttctgcgctgcctgaaggcgtaatatggccacctcacaggactacctcgatttcgttctggagcagctgccgccgctgtggtcgatccgcagcaggaagatgtttggggagtacatggtctatctgaacgataaaccgatactaatgctctgcgataacatggttttcgtgaaaaaactgcctgttttggacgaaataatggcaaactccccctgtggctgtccctacgagggtgcgaaagagagctaccttctggacattgaggaccgtgacttgacagagcgcgtcctgagattggcggaagccgccacctccgtccccaagccccgcaaaaaggggagaggggagaagtgaatacagcaagggacggcttttgccgtcccttgctgtgtagcgggcgatggaaaggaactatttattgtttctccgcttccatctgacaaggagaatgagcatgacggtaagggctatacatgtaacgccatacatcgcagccatcatgtggtagcccacgaaatcaaaccgctctgtccccgatagcaggtatggctgtttaccggccttatgcagcgcagcaacgcaggaagtcccgttataaaggcaaagggtacccaacaccgcgtatatgaaccagcgcacgattctgttttttatgacgttcacgaacatagctccaactccgttctgaccccatcgcggtagcaaaagatgtgacccgcccgcgaaaagtctttatccgcctcgacgcaatcgaattcacaaaaggatctttccaatcttttcggcgtataaaagagagtctgcgtctttagtccaaacgcctcatccaccacttcgttccacaggcgaacggaccaataactgcaattcttaccgagactccatttgtctttctggtcaatatacgcttcgattatctttagctgcggttccccaatatttacacttaatgacttcctgccaacgtatcggtcatacgttgagatataggcttcttccagattgaaaagcagccccggaagatcggagacggcccaaaccgagaaggttatcatctcgtcatgtttgatctcgtgattctttatatacaccgaatgcccggactgattatcaatggaaagccaggtatgtccaaggcatttgagaaacggcgtggtttcactgtcaccgttgaatgtggtgatagagaaaataatgccatcgtcctcacaggagatcgttttggatcggctttcgtatacgttgaagtcaaaccaaaggcaaaaaaccgccgtaagtgcgaaagggaggatgatccataccatcgatttcttccgtcgccacatgcgatcacactcctttgttaaatcctacattttctaatacagcaagcggtaatatgtcactgagcatactgtaattatagaggaaaataccctgtagtacaaggctttcccataattggttttgttcaatcttgacttgcttacgccagtctgctaccatgttgccaccgagttgccaccgatacccgcaggaaggaggggctttgaaaagatagatacgattgaacaaaataaaaattttgttcaattgagtggagggtaaccgctctttttcatatagtaagtccgttttggactgatctcgccctgagtaagctatacaagccattaccggcgatctgtagttgccgcatgacagtcttgtacagaatactgacccaaatacccgccacagtttttttcaaggcattgtacatatggattaccgtaccgattcgccccagctgctgctggattttctcagctaccacgaaaccatcaaagcgcattctcagcgcaccgtggatgaatactatctggatatgcgaaatttctttcgctatctgaagcagcagcgtgacccggcgcttgcctgtaaagcgttggacgagatcgacatccgtgacgtggatattgacttcatttcccgcatcacattgacggacatttacagctatctgacctatcttagccgtgatcgtgtacagcaccaaaatagtgaaatttctaacaaaggtctgaacgctgcttcccgcgcccgaaaattggctacaattcgttcgttttttaactacatttgcaataaacggcatcttttggaagacaacccctgcaaggacgtggatacgcccaagcagatgaagtccctcccccgctatctgacgctgcatgagtccctttccctgctggagagcgtagatggcgccaactgtgagcgtgactactgcattctgacgctgtttttgaactgcggactgcgtatctcggagctgatcggcctggatatcacggatattcatgacgatgccctgcgtgtgctgggcaaaggcaataaggtccgtgtggtctatctcaatcaggcctgcaaggatgcgcttgcgcggtatatggcggtacgccggcccattaccgggcgggataaaaacgcactgtttctctccgggcagaataggcgcatcagtcgttctatggtccatgcgctggtgaaaaaacacctgtccgccgccgggttagacagtgaaaagtattccagccacaagctgcgccacaccgctgccacattgatgctgcaaaacggcgtggacgtgaaggcggtgcaggaggtcctggggcacgaacacctgaataccacggagatctacacgcatattgacaacgaggcgctgcgtgtagctgcaaaggcaaatcccttgtcacacgtgaagatgaaagggaaaattgaagacagtgacagtaaaaaggcggaggattgacctccgcctttttgtattttgcatattgaaaaccacccaatagaggtgtggccggatcatattcatatgcttcttgagatcccgcccaaaatcacggtttcgagctttgtgtgatatacacccggcttcgccgagggatatttatttgttcatttccttggccttcccctgctgctttttcagccgttctcccacctttttcatcaggcgcagacacagcgccgagctggcagccaacagcaccgttcccgccaaaaactctttctttttcatataccggctcctttctatgcctaccgttttttgcaatatagcacattacgatcccgtttgcaaatgtgtcgcaggtcaattttgccgaacggttcaatatatcacagagtttgtcgaaaacttcacattttctgccgatttttgtgaccacttttcgttgtggttttgacggtacagcgccttaaatttttggcgggttcaccaaaaatcaacgcactgacgatttctgcccttcctctttatttactttaccggggaaatgtgctttaataaggctgtacgttcaggcgcatttgcgcctcaacaaaatttgaggaggaaaagtacatggtacagtttgcaagtagaatgaacctgctgaagggctccgagatccgcgagcttctgaagctgacggcacagcccgacatactctcctttgccggcggcatgcccgctcccgaactgtttcccgtggagcagatgatggaggcctctatcgccgttctaaaggagcatggccgcgaggctctgcagtattccaccaccgagggcttcccccgcctgcgcgagcagatcgctgagcgtatgctggccaagaacaatatccacaccgacaaggatcacatcctcgtcacctccggttctcagcagggtctggacttctctgcccgcgtgttcctgaaccccggcgacgtggttctgctggagagcccctcctatctgggcgccgtcaatgcgttcaaggcctgtgagcccaagttcatcgaagttcccaccgacgacggcggcatgatgatggacgagctggagaagatcctggccaccaccgagcgcgtgaagatgatctacgtcattcccgatttccagaaccccaccggccgcacctgggatctggatcgccgtcataagttcatggagatcattaaccgctatgagatccccgtcatcgaggataacccctacggcgagctgcgcttcgagggtgagtatatgcccgcactgaagagcctggacaccaagggtctggtgatctatctgggcaccttctccaagatcctggctcccggctaccgtttgggctgggtctgcgccgaggatgagatcctggctaagtacaacttcatggagcaggctgcctctctgcaggcatctaccatcggccagatggagacctccaagtggatcgatatgttcgatctggacgcccacgtcaacaccatccgtgagtgctaccgcaagcgccgtgccgtgatgctggagacgctggccaaggagctgcccgagccctgcaccttcacccgtcccgacggcggtctgttcgcatgggtcgttctgcccgagtacatggacgccaaggatctgcagatgaagtgccttgccaagaaggtggccttcgttcccggcggctccttcttccccaacggcggccacgacaacaccctgcgtctgaactacagctgcatgcccgaggataagatcgtcaagggtatcacagcgctgtgccagaccatccgcgaaaatcttcgctaacagtcaagatataaggagacgacgcatcccatgaagcacgtaaaagtcctcatcggcaactatggcagcggcaagagcgaattggctctgaattttgctatgcaggcggccgcccgcggcgaccggacggaactgctggacctggatatggtcaacacctacttccgtctgacagagcgcggcaagctggtggagcagaaggagatccgtttggtctcccccaactttgcctgctccggtatcgagacgctctctctccctgccgaggtgtcgtccgcctttgtgctggattgggacaccgtcatattcgatgtaggcggcgacgacgtgggcgccacagcactgggccggtatcaccaggactttgtggacctggcgcccggtgcactggaggtgctgaacgtggtgaatattcggcggcctttggccggcacggtggagaagcttctccgtttacaggagggtatgcagacccacgcgcggctgcagatcaccggtatgatcaacaacacgaacctcgctactgccaccaccgagcaagacctgtgggatggctaccagatgctccgtgaggtcagtgacctcacgggcatcccggtttcctacaccaccggcaaaaaggagtttctggacgcctttctggcccgaaaccccgatccaaaatatgtgggacagcccattcccatcgacgtgtatatgcaccgcgactgggactcctatatcgagtacgggctgaacaccaaaaaccctcacaaggatatgtattaaacccggttacttccctctacgcgaagggattgtaataacacagcaaacacagcatcggaaaaggaattaagaaaagaggtgtaaagagagtggtaagagttaccatcgacgaaaatctttgcaagggctgcggtctgtgtgcaagagcttgtcccaagcacatcattgagttgtccaagacccgcatcaatgcaaagggctaccatccggcagaagtgacgaacatagaggcgtgcatcggctgcacgtcctgcgcccgcacctgtcctgatgtggtgatccgaatcgaaaaagactaaggaggcagaaagaatatggctttgactcttatgaagggcagcgaagcgattgcagaagccgctattcgtgccggcgctcgctttttcttcggttaccccatcactccgcaaacggagatccccgaatatatgtccgcccgtatgcccgagatcggcggctgcttcctgcaggccgagagcgaagtggcggctatcaacatggtgtatggcgctgccggtaccggcgcccgcgtcatcacctcctcctccagccccggcgtgtccctgaagcaggaaggcatctcctactgcgcaggcgccatggttcccgctgtcatcatcaacgtgatgcgcggcggccccggtctgggtaatatccaggcatcccagggcgactatttccagggtgtcaagggcggcggcaacggcgactatcatctgctgaccttcgcccccgcttctgtgcaggaggccatcgacctgatgatgatcgcctatgacaaggccgaaaagtaccgtatccccgtgctgttcctggcggacggcatcatcgcccagatgatggagcccgtggagctgcccgagatggtagattacaaggtagacccggagaagaaaccctgggcctgcaccggctggaagcccggcgatgatcccgctaagcgcggcattatcaattctatctacatcgataccgagagcctagctgtccacaatgacgagctgcaggccatgtacaaggaagtcgttgccaacgagcagatgtgggaaagctacaactgcgaaggcgctgagtacatcattactgccttcggcaccgtggcgcgtatcgccaagagcgctatcgccgagctgaaggaaaaaggcattaacgtcggcctggtccgccccatcactgtgtggcccttcccctatgacgctgtgcgtgaggcctgctgccagcccggcgtgaaggccgttctggacgttgaactgaacgaaggccagatgctggaggacgtaaagctggccatcaatggcgccaagcacgttgacttcttcggtcattgcggcagccagatgccctctaccgacgagatcgtcaccaagatcctgagcatgaaggagggtaaataagatggctgtactgttcgaaaagactaagctgctgactgacaagcagttccactattgccccggctgcaaccacggcatcatccaccgtctggtagccgaggtcatcgacgagatgaaattagacggcaaggtgatcggtgtggcccctgtcggctgctccgtgtttgcctacgactatttcaactgcgatatgtacgaggctgcccacggccgcgcacccgctgttgccaccggtatcaagcgctccgtcggcaaggacactctggtattcacctatcagggcgacggtgacctggcgtctatcggtaccgcggagatcgttcacgccgcccaccgcggcgagaagatcaccaccatctttgtcaacaacgcgatctatggcatgaccggcggtcagatggcccccaccaccctgatcggccaaaaggcaactacctgccctgctggccgcagcgaggagtggagtggtctgcctatcaagatgtgcgagatgctggccgctgttcccagttcttactacattgagcgcgtggcggtcaacaataccgccaacatcgccaaggccaagaaggccattgccaaagccttccgtctgcagatggagggtaagggcttcaccatgatcgaagtgctgtccacctgccccaccaactggggcctgtctccggtggaagctatggattggctggagcagaacatgatcccctactatcctctgggcgtttacaaagacaaggaggcgaagtaacatggaaaaaacctttattttcgccggtttcggcggtcagggtatgctcctgatcggtaagttcgtcgctatggcctgtatgttggatggcaagcacgtctcctggctgccctcttatggccccgagatgcgcggcggtaccgccaactgctccgtcatcgtctccgatgaccccgttgcctcccctctggtggagaaggccgatgtgatcgtggcgatgaaccgtccttctctggacaagtttgaagcacatgtgaagcccggcggcgttctggtcatcaacagctctatcatcgaccgcaaagcggttcgcgatgatatcaccgtggtgtactgcgatgccaacggcattgccgaatccatcggcaaccccaagggtgccaacgtggccatcctgggcgcgaccctggctaaggctcccgtcacctctgtggaaagcatgatggaagctatccgcatcgagctgggcgagaagaaggcccgcttcctggagggcaacaagaaggctctgctggccggcatggaagccgctaagtaagtcgttcatacattcttacatcattttggcccccggcatccgtatggttgccgggggctttcttttgtttactactattttcaccgaatggtttattaaaaagaaaaggccagtgaaaaaggtttccttcacagaaaaaaactattgacttcctaccaaacgtttggtatcattactccattataaggaggtgtcgcttttgagctctttttcttattttgtgggacaacgcatcaaaaaataccgcaagagccgcggctataccatcgagcaattctccgccatgatcaataagagcaaagcgacgctgtccaagtacgaaaacggtgccattaccatcgacatcgaaacactgtacgagattgcgcaggcactggatattgatctaaaatgcttcatcgattatcagcctcccatgttccatgcggagccggcgctacctaagaatagctacttcaatcagacattggcctatatgtactactatgatggccgtattcgccagatggtgcgctcacttctgcggttttctcagtcagtggaccacgagagtgtcgaggtcacgttgtatatgggcgtggcgtccttctccgatccggaccgttgccagcatctgttcaccggagagatgaaggcttacgacaccatcacccacatggtgttgaccaatcagatcaacgaggcggaaaagatgtatatctgtatgctcaatcccatgcagaaccgtatgcccgccgtgggactggtatccggtatcggctcctccccgttctttgcacccattgcattgaaggcgctgatctctaaagagccgctggaggaaaacgaccgcctgctgggcaccatcaaactggataaggatgattatcatttgctgcgttactacaatatgatggtggtcaaccgtccggccgccctatccttacaataatatttgaccgcgcaaaggctgtgaaggtgtactccttcacagcctttagttcattttctgcaattctcgccgcagtcgcaggatgatacgcttctccagccgtgatatgtagctctgcgaaatccccaatcgatccgccacctccttttgggtgagctccttgataccgcccaggccaaaccgcatggtgatgatatccctctctctcggactgaggtgcgataccgccgtttgcagcagctgccggtccacatccgcttcaatgggccgcatgaccacatcgctgtcagtccccagtacgtcgctgagcaacagttcttttccgtcccagtcggtattcagcggctcatcgaaactgacctctgtccgttgtgcgccgttcttccgcaagtacatgagaatttcattctcaatacaccgcgaggcgtaggtagccagcttgatattcttatctgtccggaacgtattgaccgccttaatcaatccgatagtgccaatggagatcaggtcctctatatggataccggtattttcaaaacgtctggctatgtaaaccaccaaccgcaggttgtgttcgatcagcgtctgccgcacctgaaaatcgccggtattcagcttttccagcagaacagactcctcatctctcggtaagggtggcggcagcgtatcgctcccgccgatgtacatgaccttatccggcctgtatacgctgtgccacaggcgtttcagccaaatcagaagctttgccatgccctattctcccttccattgccccccacagggcgtgatacccgccgccatcactgaccgcttgctccgacagcgcgacgggtgtccgtggatagcgtttgccattcacttctatgtaatcgctacaggctgccaacagcaggcctgcagccgtccccaccgcgcgaaaaggcagcagtgtaaaccgtaccggacaacctattcggtgtagctttgccattttctcttccggagacagctgctctgccaaaacatcggccaccgccggtgtccataatgcgtctgcggaacggcgctccattaccagcgccggacacccggtgaccggatccctcagtgtattacccgtgtcgtgcagggcggtaacggtttgtatccttccgccgacagatactttgatctgcaacaattctccccctccatgacgtgctgcctgaccggcaaaaagccggagaagcacgtaaaacaatatactgaccaatataagcgcttgccagctaacatcggcgtaatacaaccgctgtgccagtcccgccaccgagccaaaggccaggccgagggccagcagggtgccggcgagggcggccgaaagcaaaaaaaatgtgaggaccgggcggaaacggcgaaacgcggcaagcgccagcaagcctccaaaggccaatcggatcgccgggtgagccaaaaatgcaagctcggaaataaagaccgcagccgcgtaaacgccgcccagcaccgcgcaaaaaatcagccgccttcgacgcagcggaaagccgcaaagccttgcggcacataggaaaagcagatagtctaccacgctgttgagcaggaaaacgcggtccagatacaccacagtcattgcctcacctcgctgccactattatagagcggcgggacgaaaaaaaacgtcgcaaccaggcgggcaccgcagcatttgtaaccggttcgttaccgctttataatccatccgtcaccgcttttcattgacattccgcgtcattttggtatactttttgctatagcttttgttgctcttttatggctgttgttgacaccttattggcaccttttctatacctcatgaggatcaacctcacgagggtgcgttttttacgggtcaaaaaataccgtgattgtatttgatctgcccatataggataaaggccaggccaatagttatcgccggaaagatgatataatctattgccgcctcattccagaatgtggcgaaatacgccaagatcagggacgcccccataatgaccgttcccgtccccaccgccttaccgtatttggggatgtcctcttctttcacttttctgcggttataggaatgtatggtgctgatattccctttgatattcaagatgccgagcaccgacaaaaatataccaaaaatcaaaagcaatacattatccatagcggcctcccaaaaatagaataattctttaaagcttttgtccaaagcaatacagaggaaatagatgacccacgggctgtaaagaatggtatgggccagcgcggaggacagcacagaaaccatgcagcataccagctgtctgtatggcggctctcccgctaatagaaaatcacaaccaccagtaaactggtggttatgattcatgatcaaagatggccttcttctccagcaggggcataaactcgtccttccaccggtggtgcatagcggacacatcgtacagggaaagggcctcgcggtccatatccagacgaatgagcacgtcgtaacggttgtcccggtccacacagttggggatgacctccgcgccgtgaacgccgggaatatccgccgcggcggagaatatctcccggatacgcggcagcagcgcggcgcgctgcgccttggcctccggagtgaattttgccagaatacagtgcttcatggcagcctcacagtcccaggtacggcaggaccagcgttacggccatgacgatggccagcagcagggcgatgcccatggcgaagtatcttgtccatttcggtctcattgcaattcctccttcggcacgatgcgccgtatcattttttcgatcttacgccggggctgcatgacctcgtggccgcagccgaggcaccggagcttgatatccatgcccacacggagcacctgccagcgtttactgccgcaggggtgctcctttttcagctctaaaacatcatgtaaccgcaggtccatttccgttcttccccttaatgtcgtcccagtaccgcttggcggcctgctcggtcttgttttcgccgtacgcatagtaatgcgtatcccccaaggactccggcagatagcgctgctgcacatagtggtccgggtaattgtgggggtacttataggcgggggctttgtccgcgccggcactgtcagcgtggacgtttttcaggtgccgggggatgtcacccaccgcgccgcgctgaatatcctccatagcggcgatgatagcgttgtgggcgctgttggatttgggtgcggtggccagcagcaccgccgcctcggccaggggcagccgcgcctccggcaggcccagctgcagtgccgcgtccacgcagctttttgtgacggtgatggcctgcgggtacgcaaggccgatatcctccgccgcgatgcacagcagacgacggcagggagagatcacgtcgcccgccaccagcagacggcccaggtagtacaccgccgcgtccgggtcggagccgcggatggatttgtgcagggcggagagcaggtcatagtggtcatccccctccctgtcataccgcatggcgctgcactggcttagctgtaaagcatcatcccttgtcacatataatccgccatccttcggcttggcggaacggtacagcagctccacggcgttgatggcctttcggacatcgccgccgcagccggcggccactgtgcggggcacatcctcttcccaggtaaagggcagctggctcctctcctgctcgatacgcaggccccgttccacggcggggatggtatcctccaccgacagaggcttaaattcaaaaaccgtgctgcgggacaggagtgcgttgtagatatagaaatacgggttctctgtggtagaggcgatcagggtgatcttgccgttttccagaaattccagcaggctctgctgctgcttcttgttgaaatactgtatctcatccaggtacagcaggataccgtttggcgccatcatggtgtccacatccgccatgacattcttcacatcctggagggatgcggtggtggcgtttagggtgtacagcgcctttttcgcctgcctggcgataatgttggccacggtggtctttccggtgccggagggaccgtagaaaatgaggttggcatcggtgccgttctcgatcaggcggcgcagcagcgccccctcgcccagcaggtgcttctgtccggccacatcgtcaagagtctggggccgtatctcgtctgccagcggacgcatagcggcaccgcctcccttctgtggaaaatcttatgaaacagtatagcacagattgcctttttctgcaacctctgttacaattgggatgaggtgatgtcgcatgaagtcgaaggaacaggtcggcgccattatcgcggcgctgaagacgctgtacccggacgcgctgtgttcgctggactatgagaaggactatgagctgctgttctccgtgcgtctggcagcgcagtgcaccgacgcgcgggtcaatctggtgacgccggcactgtttgcccgctatcccacgctggaggccattgccgccgccgatgtggacgaggtgggtacatatatccagtcctgcggcttctggcgggccaaggcccgggacatcgttggctccgcgaaaatgctggtggagcgcttcggcggaaaggtcccggacaacatggaggacctgctctcactgcccggtgtggggcgcaagaccgccaatctgatcctgggcgatatctacggaaaggacggctatgtctgcgacacccactgcatccgcatcaccggacggctgggactgacggacggcagcaaggacccgctgaaggtggagcagcagctgcgaaaggtcattcccccggaggaggccaacaacttctgccaccggatggtgctccatggccgcgcgctgtgtatggcacggaagccggactgtgaaaattgcgccctgcgggcgctgtgtgactatggcagcaccgcagaacgatagatgacagaaggcgccccgcgccaaacggcgcggggcatttatctgcattaactgtaaggtgatattactttacacgatttaccatgtggtcggcaagctccagcaaaaacgaattatcgggccaggcggcaatagcggccttggctcgcgcggtgtattgctccacgtcgcgctggcactgctccaggcccttcacatccaccagcgtgaccttgccctccgccttgtcagagccgatgggcttaccgaacacctcctgtgcgcctgtcacatccaggatatcgtcacggagctggaaggccaggccaaggccgtcgccgaattcacgggcctgacggcgcttgtcggcgttcattccggcggccacacagcccagctccgccgcggcggagatcatggcgcaggtcttgagacggtccagctgggtcaggccggcttcctcgcggacgtcgcagagggtgtccagcacctgtccggccaccatgccgtcggcaccggcggcccgggccaggacctcgaccgccgcgatacggctttcggcgggcagtcccgtcgcctgggcaatgagacgaaaggcctcgggctggagggcatcgccggccagaatggccagcgtctcgccgtagaccttgtggttggtgggcttgccacggcgcagatcgtcgtcgtccatgcagggcaggtcgtcgtggataagggaatagttgtgcaccagctccagcgcgcaggcatagggcagcgccaggcgccagtcgataccgcccagacgggcaaattccagcgtcagcaccgggcggatacgtttgccgccggagagcacgctgtaccgcatggcatcgtagagacggtcatagggggcgctgccggcaaagagtgtggaaaggtagtcctctaccgccgcgcggtactgctcatagtgtctttcgtagtccatggctcaatcctccgcagcaaaatcatgctccaccggcgcgtcatcggggcccttggacagcttgaccaccttctgctcggcggtgtccagctccttgcggcaggcgttcaccagcttggtgccctcctcaaacagcgccatgctgtcgcccagcgtggcatcgcccctttccagcagggagacgatctcctccagccgggacatattctcctcaaacgtcttttttgctgccatgttcgttctccttttcctttacttggcaccgcagggtgccgtcggccagccgcaggcgcagggtctcccctatccgcgcctgatcggcgctgcggagcaccgtgccgtccggccgctgggccagtgcgtagccgcggcccaggaccttcaatgggctgagggcatccagcgacgcggccagcgcgccgaagcggcggttttggacatctgtcaccacacgcatggcggcacagagccggtgggtcatatggtccacatcctggcggcggtccgccaggtaagcggtcgggtccgtgaggacgcgttttttcgacagggactctaaacggtgggaatgggcggcgatatcgcggcgtatcgactgtgtcatgcgggaatgggcggcatccagcgtccgcagcagctcggccatgtccggcacggcgatctcggcagcgttggagggcgtggaggcccgccggtccgctacgaagtcgctgatggccacgtccggctcgtggcccaccgccgagatgacgggaatatccgagtcgtagatggcgcgggccacgcgctcgtcgttaaaggcccacaggtcctccagcgaaccgccgccgcggccggtgatgagcacatcggccaggctgcgggcgttggcgtaacggatggctccggcgatctccgccggggcctcagttccctgcacgcgaacgggcagcagaaggaccttggcgatgggatagcggcggcggaggatgcggatcatgtcgtggaccgccgcgcctgccggggaggtgacgatggcgatgcgccggggatatggcggcaggggctttttatgggtctcgtcaaacaggccctccttccgcagcttttccttcagctgctcaaaggccacactcaggtcgccggcgccctcgggcgtcaggccggtgcagtacagctggtaggcgccgtcgcggggatagacgctgatacggccggaggcgatgacctgcataccgttttccgggcggaagcgcaggcgcgcggcgctgcccctgaacatgacgcacttcagactgcactggctgtccttcagcgtaaagtagtgatggccggaggggtataccttatagttggagagctcgccccgcagcaggacctcctgcaatggcggcacgttatccagcaggtccttgataaactggttgacctcggacaccgtgaaaatatactggcccgacgtggcgatcactcctttctgtatgcgacctgaaaaggcagagccctcacgctctgcctttcgtatgcggttttcagtccttttccttgacctcgccccgggcgaagctgcccagaataccgttgatgaatttggcaacctcgggcgtttcgtacttcttggcgatcgtcaccgcctcgctgatggcggcgccctgcggaatgtccgccatgtagagtatctcgtacatggccacacgcatgatggcggatgctaccagtgaaatgcgctcaaatcgccagccccgggcgtacttttcaatgtcggcgtccagctcagcggcgtgctccgccacaccggagaccaggcggcggatatacgcctcctgcttggtgttgggccggtcggcgtagaggtcatcctctgccgccagctcggcaaagcgttcatcgctgagctgctggtccagaaactcctccaccggcagttcggtgaagctcagctggtacgccaagtgtatggcgatctcccgtgcggtgctgcgtgtcataagcgttcgtccttttctctctcgtctgttgttcagttgaagctgatgccgcccacgtggacgttcaccgccgccaccttgaagccggtcataccctccagcgcggtatgcacattcttctggacctttttggccacatcgctgatggcgcagccgtaacgcaccgcaacaaaaatgcccacaacgatctgctcgccgtccagttcaacacggacgcccttgcaggtcatttttttaccgcccatcaggtcggatacgttggcgctcatcagagcgctgacgccgtccacctccaaggctgtggtactggcaatggaggccagcacatcctctgagatctggatgctaccgtcatcctcctggtggatcatatattccttattttcagccatggtctgtttgtctcctcacagttgtcattggtactcagctaattgcagtataggattataccattttttacggggaaatacaacacctattttgcaccggacgttcccgcttccatgatcttgatctggccgggagtgtaggatgtctccgcgatgacgatatccttgatcttcgctacgtcctccgcctccagaccgtcgggcgccgataccaccacgctgatggagtccgcgcccataaaggccacgcagtcggcatagccttttgccaccaccaggttctcgatctgtgtctccgccacggtgtagcccgccagcacctgaagcgtctcggatgcctcgttggctacctcctctgaggcgttctcctcgcccttggcctcctccagcatactgatggcggtatcgcgggcctgcttgcggctgagccgggcagtggagaaatagtcgtctccagcggtatccgcagtatccgcctgtgcctccgcagtctcgccattgaccagcgtggactggccaagcaccttggaggtatccgccacatccccggcatagcgccagttcaaatacaccgatgtacccaccagcaccaccacggccgccgctacggcgcggcgcttccatacctgcttcatactgtcgttcctcccatttattgttactgtttccattggactaccgatatcttatcgctgctgagtcctgtcagcacagacaccgtctccagcacccgcaggcgcacacggctgtcgcctgccccctgacagaccaccaccgccccctgataggtggggtacagccgccgggtgaccacgacctcctgcttgccgctgccgcggttcaccgtcaggacctgactgtcctgccgcacatcgccgccgctgcccagagtggcgctgctatcctccgccagcgacaacgtttcaccgctgtgcagcgtcagcatcacctgcacccgacccacgccgtccatggcggacagcacctccgccatacggcgctccgtcgcctccaaagagaaggacatctcctcccctgccgtgtcggcggcttcgatctcctgcttaccggcgggcagcagcatcaacaccacgccggccagagccaccagcaccgcgaagcggtatttattcagtatatctttcagcttttccatcattcgtctgcctcacgccaatactggtgcgcatcgtcaatggccagttccgtgctgagccacgcggacagcgcctcgtccttgggaatgtccagcgtcacggcgctgggccagggcacgccatcgcggtcctccatctctacccgcggggtacatgtgatgcccaggtcatctcccttgctggcaatatatgcggcggtcttgtccgctatgagcgcggcgaattccgcgtcgccggatcggcgatattcctctgtcaacgcctggatctgctgccgatagtcctcatagcggagggccagctcggtcaggtccaggcccagcagcggccggacgatgaccagcagcagtgccatgccgcccacggtgtgggccaccgccttcatacgcccacggggcagcagggcgtagagtatcccaacgatcatgcccgccgcgatgacgccgagaagccaggtacgcagggtttccgcgatcatgtactcaccaccgatacagaagagattatggagatcagcagggccagcgcacagctgccggtcatgcccagcatcaggccgaaggcggagcccagcgcgtcgatcaggtccgccaggggctcctgggtcacggtgcccgccagaaacgccgccagcttatacagcaggtactgcacggccatggtgataaagggcgtcaggcagatggccagcactgccagcaggccgaatacgccgatggcgcccttcagcatcccggcaccggccagcaccgtgccggcggcatcggagatgatggagcccaccaccggcaccgctgtggcgatggcggtgcgcgtcaactgggtagacagggcgtccgccgcggaggtggtcgcaccggtcaccgacaggaagccggtaaagaccagcatcagggccgtcagtgcccaggcggcgcacttgcgaaggccctgaccgatcttttgcagactgtggccgggaaccacggcgtccgcggcggcagcagcaatgcaggcgtacagcagcggcagcagtacctgacggataaggctgatgagcagatcggtgaagaacaccgtggccacctgcctggcaccggcggtgatatagccgccgccggcggccacggcggcggacagggtgggcagcagtgccttggagaacacctccagctgggacatagtctccacacccaggcccatcatccggcggaagtcgcccgccgccacaagggtgatggccagcgctcccgccacggagacatagcggggaacgcagggactgtctgccgccgcaaggcagctccccgccagactgcacagcagcaccacgcccagcagcagggccgcaccggaggcctgggtctccagcgctgtgcggacataggcgcaggcgctgtgccacagatcgcccagaccctgccacagtgtctcgtgggaggcggaggcgtccatttccggcaggatatccgccgcctccggcgggacggcgtccttcacggagtcgggcagttcggcagcccaggcacagtccagacacagaagaagcagtgtcagacagaacaggacttttttcatagcagtgactccaacaggtcccagacagcgcggaacagcggcagggacaccacgatggccgccacggcaccggcagtctccagcacggaagcgagggcgccctcgccggcatcccggcacaggtcggagcctgtccggcagatcagggcgatgcagaccgttttcagcagcggctgaaacagctgctccggcagctgaccccaggccgaggcctcttcccagaaatcccggagctgacccagcggctccagcagcagggcgaccgccacgccgcagacagccaggacaagcagcagcgccagctctcccccgccgcggcgcagcagcaccgccagcagggcccccagcaggcacagcgccgccaatcgcagtaccgtatccatgcgtcacagggagaacagggtctttaccaggtcgaacaggtcactgatctgctgcaccagcatcatcagcaccacgaccaggcccgccagcgtggtcatcatggcctgctcctcccggccgcttcgcaccagcagcaaattcagcaccgccaccaggataccgatggccgctattttgaaaatcaggtcaacatccattgtctgtccctcacagaagtaaaatgatcatcagtcctgcaccgcacagcgtggccgtggtggtcacgctacggctgtgccgatccgcctcgcggcgcttttcgtagagctgctcagcctccgcccgggcgcgggcgatggtgctctccaggcgctgggcatcgccactccaggaaatgcggcaaagcaggtcacggagttctgcgtctgaaagctggtgaaaggtattctcccaagcaagctgtaaagtcatatcgctttgaactttgtcccgtatctgacggaaccagacaccgcagtgctcccgggtctgcagtgcctccaacagcgccaggaccggcgtgcgctgccagcggatggcactctccatctcccccagggcggcggcaaaagaccacagcaggtcgcggcaccggcgctggcgtgcgtaatagcgccgcagggccagaatggcggcgctcagtaccagtaccgcaccggccgccgtggtcacagggcctccgtgcggtagtgccgccgaccattcgatgcgctgatggtgatgaggtggcgaaagacaccggcctccgccagctgccggaacagcggcttgcggcgcagctcttccccgtcctcggcgtggatcgtggccagcagcttaacgccgcagttagccgccgctgtcattgccagaatatccgccgcctcagtgatctcgtccacggcgatgacctggggattggcgctccgcagcagcatggggatgcccagtgccttgggacagccgtccagcacgtcggtatgacagcctacgtccaactgcggtacaccgcggtacatcccggccaactcaccgcgctcgtccaccacgcctacccgcagaggacagcgatcctctgtgccgttggacagtgtggcgatcatgtcgcgcaggagcgtggtcttgccgccaccgggtggtgctgcgatcagcgtactgtcaaagccgcctgctgaccatcccgggacctcctgccacaacccacggacctggcggctgatccgtaccacggcggaggagatatcccgcagggctgtgccgccgtcccccctgaccgctacggtgccgcacaggccgatgcggaagccgccccggccgatgagatagcccttgcccatcgtctccgccgccgcgtagcgggaatagcccgttaccgcgtcgcacagctgttccaagtccgcctgagtaacactttggcgcggcagttcatcgctgacaagtagttccccttcacatgttagtagtgtcatcggtcgtcctgcccgcaggcggaactcctccgcctgggccttgcggtgctccggcacacgccgggcagcctgctgccagcggctgggcagcaatgcagccgcctgctcatagcgtccgaccgcctctccgatctccatgatgacgccctcctttgttggtcttgaccccaacgtatgaaagctcgtcccggaatatgcacaaaagcccgccgggcaaggcgggcttctgctgaaaagcgccccctgcctgcggcagagggcgcttgatagacgcttttgttatatcttatgttatgcctgctgcggctgctccgtctttttggcacggaagaaatgaatgaccagaaataccaggaacgcaatactgatatagccaaagatgggatagacagtgccgatgatctcggcaaaccccagcaggctcgccgcccaggccagcacggaaactgccagcagcaccgggtttttgtgggtacggacaaaggcggacttctgctccacataggcactcatgcccaccagactggccagagcgttgcagaacatggccaccagcagcataatgccgtagatcgtacccagcgtaccgttgagccgggaggccaacgccaccatgggcagctccgcctgcaccgcctcgggataggtacccagactggtgaggatactgcccgccaccgccaacagcataacgccggagagagcaatacccacatagacgtgctttttctcccgcacatactgccccaccggggacatgatgccgataccgccaagaatgttataggccacgaaggtcagcgtggcgataaaccagttgggcatcagaggattggtattggtatattgcagctgcaagatgccctccgtgccaaaggtgcaccaggcgcccacggcaaaaccaaccgtggccagcaccaaaatggggatcatggcagagaaggcattgaccataccgctgacgccaagaagcgccaccaggaacaccgccagcatgaacacggcgctgcccagccaggtgggcacacgaaacagctgggtcagcatggcgcccacaccggcggacatactcaccaccacaaagaagaggaacagcgccccaatgacaccggtggcggcacggagccacttaacgtcccacggtaccagcagcttgtccatttcggcgcatttcgtcatctgcgtcagccggacgaacagaatgccgatgaccgtaaacagcagcgccgccaggacaaagcccacatagccccagttgccgaaggcgccaaagaactgccacagctcctggccggaaataaaccccgcgcccaaaaaacagccgacgtaggtaaacgccagcgaaaaggtcttgatctgcttcataccacacctcatgtcgaatttgctctaccaatatagcttatttcccccgccgcgtcaacccccgccgaccctgcgggaaaattggataggctataaaaatttttttcactgaatgcttcggtttttcgttgacgatgggcgcaatatgttgtatactattaccggaaattgtgcccgttttggcagagatattgctttaaacggcaaaagaaatcgtacaggaggagcgtatatgataaacacgatcgacggcatcatcgcggcggccaaaggcggaaagaccggtgttatcgccgtggcggcggcccacgaccagcctgttatcgaggctgtggtcgaggcccgcagggagggtattgccacgcccattcttgtgggacatgaggaagagatcaaggcgatgctgaccggcctgggtgaagcccctgccgactacaagatcatcgccggcgataccgaccaggactgcgcggccaaggccgtggccctgtgtgccgagggaaaagccaacttcctgatgaagggcatcctgggcactgccgatctgatgcgcgcggtgtttaacaaggagcacggcctgcgtactgatcatcttaccacccactgtatgctgtatgagatccccgctctgggccgtatgctggtgctgaccgacggcggcgtcaacaccttccccgatctggagaagaaggcagatattctggagaacgcagccatggtcctgcaggcgctgggctatgagcacatcaacgcctcctgcgtgtgcggcgcagagcaggtaaatcccaaggtacagtccaccgtggatgccgacacgctggcccacatgactgaccgctgggccaagtacaatatggacgtgtgcggccccgtagcgctggatctggccgtcagcgaagaggcatgccatcacaagcactatatcgcccccggtgccggcaaggcggatatcctgctggtccccaactatgaggtaggcaacggcatcggcaaagccgccaatctgttcggcaacgccaagaacgccggtatcattctgggcgccaaggtgcccatcgtgttggtcagccgcgctgacagcgcgtattctaagcttgcctccatcgcactgggcagtgtgttgtccagtcggatgaagcttgcgtaaagtcgtattgcacaagaatttgtttcgtctgactacattttttacaaaattatctcgtcagattgacaattgcttgacaatttgcacggtgaagcctatcatggagatggttcatctgccgcgccgcggcatggacatagtacaataacgtaaaagaggagattatgttatggtcaatcaggaatactacaatctgggtacggcgccctctgtgatccgccagctgttcgcctacggtctggagcaggccgccaaggtcggcgcggacaaggtgtatgactattctctgggcaatcccagcattcccgcccccaagaaggtcaacgagtccatcaagaagatcgtggacgagatggattccatcaagctgcacggctattccatggctgccggcttcgataccgcccgtgccgccgtggccaaggatctggccgagcgcttcggcctggatgtgaaagccagcgagctgttcttcacctgcggcgctgcccccgcgctgatctccatcatcaaggccctgatcgtggacgccgacagcgagatcatggcagtggcacccttcttccccgagtatcgccccttcgtcaacgccaacggcggcaagctggtggtggtccccgccgacaccaaggcattccagatccatctggacgaggtggaaaagcgcatcacgaagaacacccagggtattatcatcaactcccccaataatccctccggcgttgtgtataccgaggagaccctgaagggtctggctgccctgctggagcgcaagagcaaggaatacggccatcccatctacatcattgccgatgagccctaccgtgagctggtctacggcggcgtgaaggtccccttcatcccctgcctgtacaagaacaccatcgtatgctactcctattccaagtccctgtctctgcccggcgagcgtatcggctatgtgtacgtccccggcttcgccgaggatgccgacgcggtgtacgccgctatctccggtgccgcccgtatcatgggccacgtctgcccgcccacgctgatgcagaaggtcatcgagtactgcgccgaggagcgccccgatctggtggcttacgacgagaaccgcaacctgctgtacagcagcctgcgtgagatgggctatgagtgcgccaagcccgacggcgcgttctacctgttcgtcaaggcccccaacggcgatgccaacgctttctccgagaaggccaagctggagcacaacctgctggtagtgcccgcggacggtttcggctgccccggctatttccgcctgagctactgcgtggccaatgacatgatccagcgcagcctgcccgccttcaaggccatgatcgaaagctataaataagctgattaattcctaccatgatcagaagcgtccgcagcatgagctgcggacgctttttgtaatatagttcacaaacatacgatggatatcctgtaaatttttgcggttattcctcttgcattttgcggagggttcgcctataatggcaacatattttttataagagaggtgtttcacgcatgagcaaagtgacgatccctgctgggtacaagacgccgctgtccacctatgagatgcagcgcgcaatcgagttcatcaagagcaatttccaagtgaatctggggcaggcgctcaatctgcggcgcgtttcggctcccctgttcgtggaggagaattcgggtctgaacgataacctcaatggcgtggagcgccctgtgtccttcgatatccctgatgtgggcgcacagggccaggtggtgcattccctggccaagtggaagcgtctggcgctgaagcgctacgacttcaagcccggcaagggcctgttcaccgatatgaacgctatccgccgcgatgaggaagtggacaacctccactccgtgtatgtggaccagtgggactgggagaaggtcatcgagcgccgcgaccgcaacgtggcctatctggagcagaccgtgcgcgccatcgtgggcgctgtggtagagaccaacgacgccctgcagatcgcgttccccagcctgcacaccaagctggaccgcgaggtgttctttgtcaccacccaggagttggaggaccgctggcccgactatacgcctaagcaacgtgaggatgcgatctgtaaggagcaccacaccgtgtttctaatgcagatcggcgatgacctgaagcgcagcggcaagcctcacgacggccgcgcccctgactacgacgactggtccctgaacggcgatatcctgatgtacaaccccgtgctggaccgcgcctttgagatctcctccatgggcatccgtgtggatgaggccgctatggactaccagctgcacaagcgcggctgcgacgaccgccgcgagctgcccttccacaagatgctgctggcgggccagctgcccctgaccattggcggcggcatcggccagagccgtctgtgtatgctgatgatcggcacctgccacatcggcgaagtgcaggccagcctgtgggacaaggagaccgtggaagcctgcgaaaaggccggcgtcatgatcctgtaaacccggaacgtaaatcacagcaaaaaaggaccgccgcaaggcggtccttttatcataaaagcgccccgctttgcggggcgcttttgctctcttacagctgcgggtcgggctttttcagctcatcctccaaccgctgcagctcagcgatcatatcatcaaaggcggcgaagtcggcgctgtccaccgcctcctgggcagcgcgcaattgctcggccaacgcggtattcatgttcagataggtgctgcggcgctggctgcaccacaggcgctgctgggcaatacactgtcccagacgctccatggcacgggcacgaaattcctctgtacggcgatgggcgctgatctcgatgtccgccacgtgctccttcagagactggtactcccctgccgggccgcgcagcgcatcgttttccgcctgtacggcggcgagctgctgctgcagggcctgtacctgctgctccagatgggtattatcgtcccgaagtcgggcatcctcctccgccaggagacgcagtgtgtcgttctcggccaccgcatcgtcgcgctcacggcgcagcgtatcattttccgtctgcagcgtctccagcgccgtacggtgctcctcggcggttttttcgataaacgtgaccacatcctgacggtcgaagccgccgaacatgcacgtcttgaagctggcatccatgggcaaataccttctctctcgatttcttgtcttcagcataccacaaattccgccctctgacaagagaatgcacgcaaaaatgccgccatatatcaaattaaagcaaaaaagtccaaaatcaagatttacaaacacctctcggtgttgtatactatgatttggtgtatttttaagaaaagcaagacagaacttagcaaaaggacggagaaactatgaattgggaaatcattacatttttgggttactttgtgattctgttgggcgttgcgttgatcttctatttcaacggctccaacaaaaacagcgaggactttttcctgggcggccggtccatgggtccttgggtcacggccctgtccgcacaggcctccgatatgtctgcatggctgctgatgggtctgcccggctctatcctggcttttggcttcggacagatgtggattggcatcggtttggcgctaggcaccgccgctaactggatcctatgcgccaagcgcctgcgtaccttctccaaggccgcggatgacgccatcaccgtgccgcagtatctgaccaaccggttcggcgtggactcccgcacgctccagctggtgtgcgcgctgattttcctgtttgcctataccatctatgtggcctctgccctggttgccggcacctccgtgttcaatacgctgtttccggagatctcccccaaggtcgccatgctggtgttcctgctgatcatcgtagcctataccttcttcggcggctttactgctgtatgctggacggacttcttccagggtatgctgatgatgttagcactgatgctggtacctatcgtagtctattttggtcaccgcgagctgctggatcccacggcgttgactacggtatacgaatataccgacgccgcctccggtgcggtcgtctcctgtgatttcggcggcggcatcttcagcgccagctggcaggatatcgtcagcggccttggctggggtctgggctacttcggtatgcctcacattctggtgcgcttcatgtccattgagaagccctctatgatcaagaagtcctccaccgtcgccatcatttgggtcatcatttccctgttctccgccgtgctgatcgcctatttcggccgtatgatcatgggcgctgagttgttggccgacggcagccagaagttggtgttcatcgccatgtcccgcaagttcttcccagccgctatctgtggtctgctgctggcggccatcatcgcggcctccatctctaccgccgactcccagctgttggtagcgtccagttcctttaccgctgacctatacaagcccttcttccgcaagaatgccacagaaaaagaaacgctgatggtgggccgcattctggtgctggtactgtccgctatcgccttcctgatcgccaactccaagggcagcggtgcacaggcgattatggatatggtggaaaacgcatggggcgcattcggtgcctcctttggccccaccatcctgctgtccctgttctggcggcgcttcaactacaagggtgctgtggccggcgttgtctccggctttgtggtagacttgggctggctgctgaccggcttgaccgcctccaccggcatttttgagatcgtacctggcttcatcaccagcttcatcatcgcagtcatagtcgctaagtgcaccgccgcaccaaacgcaaaggctgtggagatcttcgataagggcaccagcaaggatgccgactgagacctatccgtctcccctatcgtgagcaaagccgggctctgccttttggcggggcccggctttataaaaagtcaaagaaaaatgaaaaatcctcttgcattttgcggtaggatgtgctagtataagtaagctgtctgaaagacatgcgccgttagctcagctggatagagcgtctggctacggaccagaaggccgggggttcgaatccctcacggcgtaccaaaagtcctcgaaatcgtctgatttcgaggacttttgtttttcataagttccgtatttagggtgttgccttttcctgacccaaacgctgaccccaacgggggcgggtagcggaaaggtctataccgcacgggagaggatgttccccatggtctgggcggctttgagttgggcgtcggtggtgacgtgggcgtaggtgtccagcgtgaagcccgccgagtagtgacccagcatcgaggacaccgttttcacgtccacgccgttttgcagggccatcgtcgcgaaggtgtgacgcaggtcatggaagcgtatccgtggcagtcccgcccgtttcagcactctttgcagcatatgcaggacgctgtccggtgacatggggcctcctgttggtgacgggaacacccattcgctgttcccaactttgcatttctgcattttcagaacgcttatcgcgtctgccgacagtggcagtgtgcggtaggcgtttttcgttttcagcggggcctcgaccactttgccgttctgccgggaaatggcccgttggattttcagcacaccacggtcgaggtcaatgtctgcccatttcagtcccagcagttcgccccgccgcagtccggtggcaaggtcgaggtagtagagttcgtacacgccgctgtccctggcttcttgaaagaaggcgctgagttggtcggcggtcagcgttttcatctccttgtgttcgactttcggcagggcgcagccctgcgttggattcctgctcaccagtttctgctcgatggcaaggttgtacgctgagccgaccatctggtggatattgcggacagtctttggggccagacctttcggctttttcttggcctcgacgcggtctacccgcccgccgtccagcaggtgcttgtagaaccgctgtaagtccagagaagtcaattctgccagtggaacgctgccgatctgcggcttgatgtggtttttcagaaagccttggctggttttgaaggtcgatgggcgcagcttgattttcgcatagttttccatccagacctccagccaactccccacggtgtaggtcttggcccgtccgtagtcgataccgacgttttcctcgatggcttttttcagtttttcttttacttccgcttgcgtcttgccgaggacgtttttgatgatggccttgccagtttccggatcgtgaccaacagtgtaccgcccctcccagcgtccgtcctttcgttttcggatattgccctcgccgttcgctcgtcttttcggcatggtatcagcccctttcgacaacgaacaataccgtactcaagagagaaaagctaccgaaaagcggaactgttatcagaaagttatcatttgcccctcggagccacgccgccttatctttgactattgcggcgcaatttctgcgctgccgggggcgttctctttagttacagcggtgcgattttcgaacggtcaagaatccctttccattgactacagcggcgtaaaatatgtacgatctgcgctgaaaaacgctcttacttggaaatcactttttcgggtagttgaaaacggcaaatttctcaatcgactgctgaacggccaccttgaaaagtccgccgccacgggccttttctgtgcctgacgttcacccaagactgcgaaaacgccgctcaaggtgcaccttagactgcggtttcaaaacctcggaaagccccgcactgcggggctttgtggctgagaggtgcccaattacgggcacctctctttatcttgtgctaaaatcgaacggccctcaccgctcgaaaaaccctcctgtaaagttcggcttttcgcccaaaaccgttcccgcaaatatcgccaaaaagttaccgtcacaacgctgttccaaaccgcttttcatcgcatctttcaacttctcccacaaacgccccacgcttgctttcacaggcaaaagtgggtacacactcggccctgctcaaaggatcgcacacagcggctcacacggcgaaacacggggcgtttcggatgggggcgctattactaccctcggagcgttttgcgcggttcggaaaccctgcgcggccgggtatcagaacggcgcactttgccgcttttgggtcttggtcggagacgcacctgaagaacgcagaaagccttcggagcagcgatgcgcttatgcgcgtcgctgttccgaaggcgtcgcggccccgctgggctgcgcagcccttactgtggagttcttggctttcctgcttttgcttaaaaccactattgcaaacagccttacgccatggtactatggtgtcaccaaatcggaagccataggatgaaaaaacagagtgaggaggattctctttatgtttgccttttttcctttggaaacgctgggaaagccccttgaaaagctcttgcaatggatggatgaccatcgtctcttcctcattcttccagctttcggcatcctgctttccctgggcgtgttttgctatgtgcatttccggacaccaccccagccagagccctttactttggaagcaaagcagggcgattactgctatctggatgttcaacacctctccaactggctcctgaaaatttcgggtggcgaggaaaataattgtttttatctggcggttggcacggatgagaccatgtgcatcgtctccatgaatgatgtgatctttgaaaactttgcggacattgttgaatacagcaactctgattttacagttccaggcaccataccacagtcataccgcgccgacggtatcgtcaagcaaatgacgtctgagaatctggatgctctcatggacttgctgggcacaacggctgaacagtatacggccttgttaggcaacaattatctggatctgcgggaagatccaaacggtaatcttgtggaactgtttgtttatgttcttggcgcatcgcttattattctgcttctctattgtgtggccctccttgatgatcagcacgaacgccgcaagcggggcaaaaccgccgaagcagagttgtaataggaacaatccgcccccggtgcttttttcaggctttggtacatactacgattcatactcaggtccccgccctgtcaggaatttaaaaggcgtattcaaaaacatccctgctgataaaacaacgaaacacagaatttatacaattccagatacgcctttgacccagttttgacccagaatggaattggaacgggcagggctggacggaaacaacggaaaatctgccgaacgaacggcggcaaaaagcacaaatcggagccgaaacagctccgatttgtgcgtgagacaacctacggaccagaaggccgggggttcgaatccctcacggcgtgccaaaagtcctcgaaatcgtctgatttcgaggacttttgctttttataagttgtcatttttggatgctgcttttttctgacccaaacgctgacccaaacgggcgttaaactataccccataaagcggacacaggaatttgacccatgtcccaataggatggatacgcgcatggcccaaggtgtcgaacgaacatgccctctcgttcctgaaggtttttgtccgttcggcaaacagcgtatctaaatcttttttatcggatgccgaataaccgttttccgtttttctggagcgacctttctcgcgtcggacagatagatctcatgatgtagtcgttccttattcaaatcattcgcatatccattccgctccaaatacgcgtccataagcgcgacggtcgcaggctcatcatcaaacgctcccaagtgcatgatttgaacgcacaaaccttcatcaatcgtcaaaaactccgccgaggagtaatccagctttttctttttcgccgcagtatcgaccgcccattcaaagtcctctttcgttatgaaatcaggcaagcggataacggagatccagttgaacgcggacttatcggtgtaatccacgccatctatatgctcctgccaccagaagccttccagcggaggaaccacatattcaaagaaaccagcaattttatgatccgttttatagctcatttttaaggtgtatgcaacagcatataacacgctgatcgcctgctgatatgccccatcttcttcgttaggatccccttttcctctgaccgcaatataatttgctttcggaacaattacgatctccggcttgttcttcggcatatagacctctttgtattctttcttgaaatcaaaagccatagctgcctcctcaagtgatgatctgcctctctctttttacgttcaaatgataccacaaacctgtaaacaattctaccgcaacttttgtgagatataagaaaagtccggacagctttctgccctgagttcctcgcttgattataaatcaattcgccctttacgctgtccccggtctgcgtcttgccgagaacgtttttgatgatggccttgccggtttctggatctcggccaaccgtgtaccggccctcccatcggccgtctttcctcttgcgaatgttcccttccccgttcgctcgtcgctttggcataaaatcgacctcctttgtaacggtacacaataccgtaaaaggcagagaaaagctatggggaagccacactattatcagaaagttatcaattctcaaccgccgcttatctttgtttctgccagcgcaactgagcgcacccgaggtttctgtggattattcctcctgcatattgccaaatatgccgcaaacaggtgtatttacagcacaaatctaagcattccgttctgcgccgcacccctttgaccacatatttgcccacagacagcgaaaagccgccccgccagggatttccctcaggcggggtggactgcttcctgttatgccgtccgtctgctccatcgctttcttgcctggaagtcggtcatcgtgcgctcttgtagtgcgttttcttctgccggcagcggctgcgctttggcgatgcccgcgtcgatcctcgccgccgcctgccgccgcatctcctccgtgatgtgggagtaggtgttcagcgtggtagccgcggagacatggcccaggatggtggacagcgtcttaatgtccattccgtgggcgagggcattggtggcgaaggtgtgcccttacggtataattacgacaaaccggaaaagccccgtatatcaagggttttcggttatctggcaaggtttttcatccttttccaaaccgaaaaatcgagccgcgaagtagttatttcgtagggggtgttatagtaacgacaaaaataaaataccgtttgggcgggctgtcagtccgtccaagaaatcaggacatttcctctgaaaagaagaaatgtcctttttttgtacccaaaatcagatgccaacaggaggaacacaatgcctgaaaaaacagcgcaaaaagaaccgggcaaaaagcccgcgccatccaaaaagccgaaaccacagcaggaagtggtcgttcagattccactctccgagctgcatccgttcccggatcatccctttcaggtgcgggaggatgcgtccatgcaggaaaccgccgaaagcgtcaaggaatacggcgtcctcgtccccgcgctggcgcggccacgggaggacggcggctatgagctgatcgcaggccaccgacgcaaacacgcctgcgagctggcaggactggccaccatgccggttattgtccgtgacattgaccgggacgctgccaccatcatcatggtggacagcaacctccagcgcgagaatattcttccatccgaacgagccaaagcctacaagatgaagatggaggccatcaagcggcagggcgcacgaacggatctgacttcgccgaaaatttcggcgaagttccgcagcgatgatgaagttggtcaggatgccggggtgagcggagataccatccgcaactacatcgccttgacgcagttagtcccggagcttcagcagatggtggacgagaagaaaatcgccctcagtcccgcctaccagatcgcggcgctgacgcccaaggagcagggcttgcttctggaaaccatcgacagcgagcaggccaccccctcgctctctcaggcgcaacggatgaaaaagctcagtcaaagcggtgagctgaatgaggacaccatgctctccattatgatggagcagaagaaaccggagaagaacgacatcaccctttccggtgaaaagctccgcaaatatttcccacgttcctataccccatttcagatcgagaacaccatcttcaaattactggacgcatggcagaaaaagcgccagcgcgatcagagccgatgagcggacaagcagtttgtttgtccgctattttcatgccaaaaggaggacgccatgtatatcaacacattcaaatatacccccaaggatgtgagctgccagctctgtaccgagtatgtgaaaaagctgggctgtaccgccctgcgctgcccgtggctggccgagcgcatcgaggccggtgtggtcggctaccgcgaggcagtcttagagacatttccccatgaacgccgcctgttccagcgcctgaacctgctgatcaagcactatcccggaagcctttggagcaacgagcagcatgagcgccgaatgcagtatcaatgcgccgtgcagggctaccgccgccgcagggataccaacgcctattatgcggccatgtacctgctgacctctaatgacgacatttaccgccgcacggcaaattgcttctgcaaggccgggattgagttcggctatgcggtgctgaaaagcacttcgccgcacaactacgcactgttcatggcagcgcgcgacctctgcgacaagacggaggccgtcacgatggcggacttagcggaaccggaggtcattgacccggaggcgctgcgcctgatcgtcaacgccactttgatcgcccgctatgggcttgccgcctttcagatcagagcgcgaggtgcggaatatgaacgctgatgattttgtcggcggtcacagcatccttgcgctggagcgctttatggacgaaacccgccacatgattattttcgatgtcctgtcgtggaaatcccctgtgggtgaaaagggcgaacggctgcggctgttcctctccgacgtgggatatgccaaggcgcaggcatctgagaggcgcggagaaatcaaaatccgcaaacacgccgccgtcattgaggggcatatcctccctgaccggaaaaagcggcgtcactaaaatgattggaggaattaccatgagcagagtaacagagctggaaaatgcgctgaccacgctgttccgcaagggtacagaggtcggctacacggaaacagagatcgacgagtttctggaaaacatcgactatcacgccctgctgcaagccgtttggaacaaggctgaaacggtctatgcctatcgcgcagacggcaaaaatgcgctgagcttggactatcgcagctcggagctgttcaagcagcgagcgacgcttctctatgaggacgtgggcgacagctatatcggcgcggtgtttgctgcccggtcgatggagctgtggctgttggaggatatgggctttgccgtcgttgccaaattcagcgtgaacgccggagaaggcgaatacgtcaccgagtaccgcgtctacaagggcagcgactgggcggacagcgagatttctctggatttggaggacttggtggccgaacttgccgccctgtgtgatccctactacgaacacgagcagcccatctatgagctgtgatgtgggaaaggagtgaaaacggagcggcttccccatgcgggaaaccattcagaatacaaacggcaagcagtttcacgccgtcagcctgtccggtggcaaggacagtaccgccatgctgcttttgatgatcgaacgaggtatgcccatcgacatggtgctgtcagcggacaccggcatggagttcccggaaatgtacgaacaccttgccaaactggacgagcatcttttccgggagcgcggcatccatattaccacgctgcggcatcccaagggctttgaatacctgatgttcgatgaacccaagcagaagccccgcagtctggaaaaccgcgcaagactgggcatcccgccctacggcaacggctggccgggaatccgcgtccgctggtgtaccgggcagctcaaaacgcacctcatcaccaaggatgtcaaccggctcaaaggcgagctgggcgcgatccactatgtcggtatcgccgccgatgaagcgtggcgctgcaaggatgagcggtatcccctcgtggaatggggcatcacggaggcgcaggcgctccaagcctgttacgaccgtggctttgacttcggcgggctgtatgagatttaccaccgtgcgtcctgctggtgctgcccgttccagcgtatcgacgagctgcggaagctgcgaaagcatcacccggagctttgggaaaagctgctggagctggatcgccgtgcgctggcgcagttcggcaccggcccgctggggcagttcaagcagaactggagcgtaaagcggctggatacgcggtttgccgaggaggacggccaaacaggttgactgccctgcggaaaggattgaagcaatatggctgtatttcgcgttgaacggacgcaggattacacggtgatgtgcaaccatcacctgaaagacagcaatctttccctgaaagccaaggggctgctctccatgatgctctccctccccgacgagtggaactacaccacgcgggggctggctgcaatctgcaaggagggcgtggacgccatcgggaaaacgctcaaggagctggaactggcgggctacatcatccgccgtcagcttcgcggcaaggacgggcgcatttccgacacggagtacaccatcttcgagaagccccgaaagacctctccaccggatacgactttaccagatacggaaaacccgtatctggataacccggatacggaggcaccagatacggataatcccgcgcaattaaatactaagaaatctaatactcaaaaatcaaatactgatctatcaagcactcattcattctttctgcctgaggcggacggaatgacggacggatttgagaaaaaagcggagatcagagagcaaatcgaatacgacattctctgtcagcagtatgaccggatgcggcttgatgagctggtggagattatgctggaggttgctatgaaccgcagccccacagtcaagatcgggcgggatgcggagtatcccaccggcttcgtgcaacagcgccttgaaaagatcacctccatgcacatcgaaaaggtcatggacggtatccgcgagaacaccacccgcgtttggaatacgaaagcctatctcatggcggcgctgttcaactctgtttccaccatcgacaaccactacgccatgctggtcaatcacgattttcacggcggcccctaaaggccgctttttttcatgcccgattccgggagaaaggatttgataccgatgaaacgcccccttgcctacatcaccgctccgtggagcgagaatgagtttgagaacaccgaaaatgccgccaagtattgcagggcggtctatgacgcgggcttttcgcccgtctgccccacgctgtttctgccactgttcctacgcgatgagattccgcaggagcataaggactgcatcgacatggcacgggagtatctgcgccgcgctcgtgtgctggtggtttgcggcagcaccgtgaatgaaagcgtgaaaaacgacatcgccgtggccgagcgcctgcggatcaccgccaccacgctggacggcatcctgaccgtcaagggacaggggcgcagaaatgaatgagcatcttctgcaccggctggtggtaccgccttagtgtcccggcattctccctgcaaatcggaggaaaggagcgtgataagtcatgcaggaagaagttgaacagagaatcgtatccctgatgatctcctgcggaaagctgggtgaacaggaatttcgcaaggccgttgccaagctgctggagcagctaaaaaacgattatcagaaatatcagcacggcaaggccaatccccacggaaaaatgaccgtcaagcagcttgccgccaaggataagggattgcagagcattgaagtcaccgatcagaatatcggctcattcaatcggattgcccggaagtatggcattgactttgctccattcaaggtcaagggcgaaaagcggtacatggtgttcttcaaagcgccggacgccgacgccatgaccgccgcgttcaaggaatacactgccaaacaggtcaggaaggcggaacgcccctcggtgctggaaaagctgcaacgcttcaagttgctcattcaggcggctgtggtggacaggacaaagcggaaggagctggaacgatgaagcagctcaacgtcaaaaagctcattcttcccaatattccgtatgtgttcatcgcgctgctggccaccaaggtcagcgaggcggtgcggatggctcccggttcggacgcttccacgaagctgctgaacattatgaccggtctgaacacggcgttccactcccttgtccccagctttcatcccattgacctgtgcgtgggcgttgccgccgccatcgccattcggctggcggtctatatcaagggcaaaaacgcaaagaaattccgcaaaaatctggagtacggcagcgcccgttggggaaccgccgaggacatcaagccctacgtcgatcccgcatttgagaacaacatcattctcacgcagacggagcggctaacgatgaatagccgccccaaagacccgaaaacggcgcggaacaaaaatgtcctgatcgtcggcggcagcggttcgggcaagacccgcttttggttgaagcccaatctgctccaatgcacatcaaaaacctatcccaccagcttcgtcgtcaccgatcccaaaggggacatcgtggtttcctgcggccatgcgctgcaaaagaacgggtatcagatcaagattctcaattccctgaacttcaagaagtccatgcactataatccgttcgcctacatccactcggaaaaggacattttgaagctggtcacgacgctgatcgccaacaccaagggcgagggtaaagccggtgacgatttctgggtgaaagcggaaacgctgctctacaccgccctcatcgggtacatccactatgaagcgccggtggaggaacagaacttctccacgctcattgaatttatcaatgcgatggaggtgcgtgaggacgatgaggacttcaaaaatccggtggatttgatgttcgaggagctaaaaaagcgcaagccggatcacttcgccgtccgccaatatgccaaattcaagctaagtgccggcaagaccgctaaaagcatcttgatttcctgcggcgcacggctggctccctttgacattcaggagctgcgggagctgacggcctatgacgagctgcaacttgacacgctgggcgaccgaaaaaccgccctgttcatcatcatgtccgatacggatgatacctttaactttctcatttccatgtgctatacccagcttttcaacctgttgtgtgaaaaggccgacgatgtgtacggcgggcgcttgccggttcatgtccgctgcctgatcgacgaggccgcgaatatcggccagataccgagacttgaaaagctggtagcgacgatccgttccagagaaatctcctgctgccttgtcttacaggcacagagccagctcaaagccctgtataaagacagcgcggatacaattgtcggcaacatggactgctccatctttttgggtggaaaggaacccggtacgctgaaagagctggcggcggcgctgggcaaggaaaccatcgacagctataacaccggtgagagccgtggccgtgaggtttcccattcgctgaactatcagaaattgggcaaggagctgatgagcgtggatgagcttgccgtgttggatggcggcaagtgcatcttgcagcttcgcggcgtccgcccgtttctgtccaacaaatatgatctcaccaagcatcccctctaccgctacacagcggattatgacaggaaatacgcctttgacatagagcgttttctgtcccatcgcctcaagctcaagccggatgatgcagttgaggtgtatcaggcagacctttccggcgaacctgtcgcctgacggcggcagcctaatttgacaacggctcgatgaaacttcgtggaagaaatgtaccctccaaaatctaaaacatatttttcggaggtactatttatggctttctttaattctgctgttggtgttcttcagaccctcgttgtggcgctgggcgctggcctcggcatttggggcgcaatcaatctgctggagggctatggcaacgacaaccccggtgccaagtcccagggcatgaagcagctcatggcgggcggcggcgtggcgctgatcggcattaccctcgtgccgctgctgtccggtctgtttggctaatcgacaattcatttgcttcccgtaaatccacggagggtgccgctttcgggcggcatcctcccgaaaggagggcaaccctatggatttcttatgggataagatcacggaatggctgaaagaaatgctcatcggcggtatcgtgagcaatctgtccgggatgttcgatgcgaccaatcaaaaggttgccgagatctccggtcaggtgggcttatcgccgcaggcatggaacggcagcattttcagcatgatacaaaatctgtcggaaaccgtgatcgtccccatcgcaggcgcaattctcgcctttgtgatgacgctggagctgatccagctcattaccgacaaaaataacctcaacgacatggacacatggatattcttcaagtgggcgttcaagtccgctgccgctgtcctgatcgtaacaaacacatggacgattgtgatgggcgtgtttgatgccgcccaaagcgtcgttgccagcgcctccgggctgattatcggcgacaccagcatcaacatttcaagcgtcatggtgggcattgaggatcggctgatggaaatggagctggggccgctgttcggtctgtggttccagtcgctgttcgttggcattaccatgtgggcgctgaccatctgcattttcattatcacatttggaagaatgattgaaatatatctcgtcacctctgttgcccccattccgatggcgaccatgatgggcaaggaatggggcggcatgggacagaactacatccgttccctgctggcgctgggcttccaagcatttctcatcatcgtctgcgttgccatctacgccgttctggtgcagaacatcgcgcttgtggatgacatcatctacgccatctggacttgcatgggctacacggtgctgctgtgcttctgcctgttcaaaacgagcagccttgccaagtccgtgttcaatgcacattaacgggggtgataccatgctgacactcacgcctgttacccttgcaacagcgaacgcatttgtcaatgcgcatcaccggcaccataaggcaactgctgggcataagttttccatcggctgtgccaaggatggagagcttgtcggtgttgcaatcgtaggccgtcctgtgagccggtatctggatgatggctggacattggaggtcaatcgcctttgcaccaccggtgagaagaacgcttgcagcatcctttatgccgcatccgcgcgggcggcaaaggcaatgggataccgcaagatcatcacctatacgctggatagcgagagcggcagcagtctccgcgccgctggctggagctgcgcaggtttggcaggcggcaaatgctggacaggcagccgcaagcccacctctgccttgtacccagcgcagatgaaacttcgatatgaaaagctcttgtaaaggggggatttctatggcctatgtcaatgtcccaaaggacttaaccaaagtaaaaaccaaggtgctgttcaacctcacgaaacggcagctcatttgtttcggaagcggcgcactcatcggcgtgccgcttttcttcttgctcaagggcagcatcggcaccagccccgccgcaatggtgatgatggtggtgatgatcccggctatgctgttcgccatgtatgaaaagaacggccagccgctggaggtcgtcatccgcaacatctaccgcgtgtgcttccagaggccgaagcagcgtccgtataagaccaacaatttttatgccgttctggagcggcaaaaccagttagaccgggaggtgtatcaaattgtccgaaaagaaaaagctgacccgcgccgaacgaaaacagatcgaagccgccatcgcaagagcgaaccgaacggataagaaagaaaaatcggcgcaggacagcatcccgtatcagcgtatgtggccggacggcatctgccgtgtgaccgacacgcgctacaccaaaacgatccagtatcaggacatcaactaccagctctcgcagaatgaggacaagaccgccatctttgaggcgtggtgcgatttcctgaactactttgacagctccgtgcaattccagctttcctttgtgaacctctcggcttcgcaggaaacctttgcacggagcatttccattccgccctgcggggacgagtttgacggcatccgcgccgagtacgccggtatgctgcaaaatcagcttgcccgcggcaacaacggcctcattaagaccaagtatctcacgttcggcgttgaggccgacaacctccgcgctgccaagccccgtttggagcgcatcgaaaccgatcttctgaataacttcaagcggctgggcgttgtggctgcgccgctgaacggctttgagcgcctgcacgtcatgcacgacattctgcggatggacgagcaggagccgttccgcttttcgtgggactggctggctccctccgggctgtccaccaaggactttatcgcgcccagctcctttgagttcaagaccggcaggatgttccgcatgggcaaaaagctgggtgcaatcagcttcgtgcagattctggcaccggagctgaatgaccggatgctggcggattttctggatatggagagcagcgtcctcgtcaatctccatgtgcagtctgtggatcaggtcaacgccatcaagaccgtcaagcgcaagatcaccgatctcgacaagtccaaaatcgaggaacagaagaaggccgtccgcgccgggtacgacatggacattatcccgtccgacctcgctacctacggcgcagaggccaagaagctgttgcaggatttgcagtcccgcaatgagcgaatgttcctgctgaccttcctcattctcaacacggcggacacaccccggcagctcgacaacaacatcttccagacctccagcattgcgcagaagtataactgtgcgctgacccggctggactttcagcaggaggaaggactgatgagcagcctccctctggggctgaatcagatcgagattcagcggggcttaaccacctccagcgtagcgatcttcgttcccttcaccacgcaggagctatttcagaacggttcggaggcgctgtactacggcatcaacgctctttccaacaacctcatcatggtagaccggaaactgctgaaaaatcccaacggcctgattttaggcactcccggcagtggtaagtcgttttcggcaaaacgtgagatcaccaatgcgtttctcatctgccccaaggatgacatcatcatctgtgacccggagggtgaatatacaccgctggtggagcgcctgcacggtcaggtcattaagctgtcgcccaccggcaagggctacgacggttcgccctgctacatcaatccgatggacttgaatctggattacagcgacgatgataacccactgagcctgaaatccgacttcattttgtcgctgtgcgagctgatcgtgggcggcaaggatgggcttgcccctgtggaaaagaccatcatcgaccgctgtgtgcgcatcgtctaccgggattacctcaacgacccgaagccggagaatatgccgttgctggaggacttgtataacgccctccgtgcgcaggatgaaaaggaagcgcagtacattgccactgctttggaaatctacgtcaccggctctctgaatgtgttcaaccatcacacgaacgtggatgtgaatagccgcatcgtctgctacgacatcaaggagctgggcaagcagctcaaaaaaatcgggatgctcgttgtccaagaccaagtgtggaaccgcgtgaccatcaaccgcgccgcccataaaacgacccgctactatcttgacgagttccatcttcttttgaaggaggaacagacggcttcgtacagtgtcgaaatctggaaacgctatcgcaaatggggcggcatccccaccgggatcacgcaaaatgtcaaagacctgttatccagccgggaggttgagaacatttttgagaacagcgatttcatctatatgctcaatcaggccgctggcgaccggcagattcttgcaaagcagctcaacatttcgccgcatcagctctcctatgtgacccactccggcgagggcgaggggctgctgttctacggcaacacgatcctgcccttcattgaccacttcccgaaggacaccgagctgtaccgcgttatgaccaccaagccgcaagaggtggcgtcggcatgaaaagagaaccgcgtttgcagttttccgacgccgatcttgccgagccgaagctggaaaagcccatcaagcgggtgaaaaaagcggaggccaaggcggataaggcgcaggcgaaaatccccaagaaaaccgtggtcaaaaaggaacgcggctttgatccggccaccggcaaggtcaaaacgcagctccgttttgaggaagtggataagaaaaagccgccctcaaagctgacccatgccgtgcaggatgcccccgccaacctcattctctctcaggttcatcgggaggtgcggcagagcgaggatgacaatgtaggcgtagaggccgcgcacaaggtagagcaagccgtggagagcggcgggcggctggtgcagtctgcccaccgcgcccatcagctcaagccttatcgtgctgccatccgtgcagagaaaaagctggaacgagccaatcttgacgcgctccagaagaaagcagagatcgacagccccaccagtaatcccgtttccaaatggcagcagaagcaggcaattaagaagcagtatgccgctgccaagcacaatcaggcggcgcagactacggcaaaggcggcagagaataccgccaaggccgcgaaaaaagccgctgaaaaggctgagaaagcgggcaaatatgtgtgggaacaccggcgcggctttgccattgccgccgcgattctgctgatgctggcgtttctgctcaacggcctgtcctcctgctcggtgatgatggatggcgtcggctccgggatcgcggccagcacctatccatcgcaggacgccgatatgctgggtgcggaggcgcagtattgcgcgatggaagcagagcttcagcgctacctcgacacctacgaaagcacccatgactacgatgagtaccactttgatctggacaccatcgagcatgacccctatgtactcatttccatgattacggcgctgcatcaaggggaatggacgctggatgaggtgcagggtacgctccagatgctctttgaccgccagtacatcttgaccgaggatgtggtggtggaaacccgctaccgcacggaaaccgacacatggacggacgcggacggcaacacccatacggacacctatcaggtgccgtatgactactacatctgcacggtcacgctggaaaacttcaatctctcccatgttcccgtttacattatgagcgaagaacagctcggaatgtacgccacctatatggccaccctcggcaaccgtcccgacctgttccccggttcaggctacatcggcaagtatgtggagggcagctataccgactacggcattcccccggaggcgctggacgatgaggtatttgccgccatcatcaaagaagcggaaaagtatctcggctacccctacgtttggggcggcagcagtccctccacctcgtttgactgttcgggcttcgtcagttgggtcatcaatcattccggttgggatgtgggcagactgggcgcgcagggactttgcaatatctgtacgcctgtatcctctgctaacgtcaagccgggcgatctggtgtttttcaccggaacgtatgatacccccggtgtcagccatgtgggtatctatgttggcaacaatatgatgatccactgtggcgacccgatctcttatgcgaacttaaattcaagctattggcagtcccatttctaccgttatgggcgcttgccgtaaaggagagtgaacgatatgaacccgaaaattatgaagctccgtggagagctggagaagaacaaaggcaaaatctctgatctgcaaggccgcaaccgcgagctggaaaagcagattcgtgagctggaggacaccgacatcatcggcatggtgcgtgagaacggcatgacgatggagcagtttgccgagctgttccgccgtatgcaggccgcgcctgcaccggccacttcggaaaaggaggcgttgaaccatgactaagaacacaccacgcatttttatcagcctgctgctgatgctcctgtgcatcgggattctccccgtttccgcctttgccagcgacggtgattatcctgatgatgcgctgcccaccgccgaaagcagcgccgcagacgcacaggaaacaaaacagatcggcacggtcacgaccaacggcggcaacctgaacgtccgcaccggcgcgggactggacaacaccgcgtttacgcagctccccaacggcacggtggtcgatgtgattggcagggacggcgattgggtaaaaatcctgctacctgcccgtgtgggctatgtgtacggcagctatctgaccgtcaccgacgccgccgacagcaccgtgagcatcggcggcatgacgggcggcagcgatgcgctgacaccggacggcaacctgacgctgatcgatgatattggcaccagcaccaaggcgggaaaacagttcattacgctggaaagcaaaaacggcaatacgttttacctgattattgaccgtgacgatgagggcgaagaaaccgtccatttcttgaatcaggtggacgaggctgacctgatggcgctgaccggcgaggaagaaacgcccgccgtctgctcctgcacaaccaaatgcgtgtccggtgcggtcaatacatcctgccccgtctgcgcggtcaacatgaccgagtgcgtgggcaaggagacaaagcccgaagtccctaccgagccgacagaacccaccgccgaggagccggagaaaaagagtggtgtgggcggcatccttgtcgttctgctgatcgtcgcactgggcggcggagccgcgttctacatcttcaagcagaaaaaggccaagccgcagaccaagggtagcgccgatctggacgattatgactacggcgaggacgaatacgagtttgagccgtatgaggacgaatcggaacaggatactacggaggatacgaacgcatgagatatttcaccaataatccgctggaacgcctgatgatgcagaaaccgaaagcagcgcgggaggatagccctcccgccgctgccaaggaacacttctgctatggctgtaagcgcttcgggcagaactgcatccgcccctgctaccgtgacgtaaagagaatggaggctgcaccatgcgtcttgtgattgccgaaaagccctctgtggcgcagagcatcgccgccgtgctgggtgcgaagtcacgtcatgacgggtatctggaaggcggtggttacatcgtgtcgtggtgcttcgggcatctggctgagctggccgacgccgccgtttacaatgccgatgatgccaaatggacgctggcggcgctgcccatcattcctacctcgttccgcttcatcgtccgtgcggacaagcagaagcagtttgacattctgcgggagctgatgcgccgggaggatatgaccgaggtggtcaacgcctgcgacgctggacgcgagggtgagctgatcttccgcacagtctactgccttgcaggatgcgccaaacctatcctgcggctctggatttcctctatggaggatgatgccatccgcagcggcttccagcagcttaaatccgggcgtgactatgacggcctgcatcaatccgccctctgccgcgccaaggccgattggctggtgggcatcaatgccacgcggtatttctccctgacgtatggccgcacgttgaacattgggcgcgtcatgtcgcccacgctggcgctgctggtacagcgcgaggcggagatctccgcatttgcggcagaaccgttctacaccgtccagctcgattgcggctttcccgccacgacaggccgaatgaaggacaggaaggacgccgacgccatcgccaacgcctgcaagggcaaggcagtaaccgtcaaaagcgtggagcgcaaggaaaagtctgagaaagcgcccgcgctctacgatttgacctccctccagcgcgacgccaaccgcgttctcggctacacctctcagcagaccctcgactatctccaagcgctctatgaaaagaagctctgtacctacccgcgcaccgacagccgcttcctgaccgacgatatggagggcagcgtccccggccttgtcgccgccgctgccgctgtctgcggcatggagaagcctccgaccatctgcgccaagcaggtatgcagcagtaaaaaagtcaccgatcaccacgccattgttcccaccatcagcgcggaaaaggtagatatggcctctctgccgctgggcgaacgcgaggtgctgaagctggcggcaaggggcttgcttcgtgcggtggatgaaccacatcgctacgcagaaacggtcattacggtggaatgtgccagtcagagcttcaccgccaagggaaaaaccgttcttgctcctggctggaagcgctatgagcaggagcagacggaggcagcgcccgcgctgccggtggtaacggataatcagacgctttccgtatctgccgcgtcggtcaagaccggaaaaaccacgccgcccaagcatttcaccgaggatacgctgctggccgcgatggaaaacgcgggcaaggaggatatgccagatgatgccgaacgcaagggcatcggaaccccggcgacccgctccggtatcattgaaaagctggtgtcctccggttttgtggagcgcaggaagtccaaaaagatcacaaatctgctgcccacctctaccggcacggcgcttatcaccgttctgcccgaacagctccagtctccgcagctcaccgctgaatgggagcaccgcctgaaagagatcgagcgcggcgaaatcgccccggacagcttcatggatgggatcgccgccatgctgaatgagctggtgcagacctacaagcccatccccggtgcggaagtcctgttcccctccgggcgtgaggtggtcggcaagtgtccccgctgcggagccgaggtgacggaatcaccgaaaggctttttctgcgagaaccgtgcctgttcctttgttctctggaaaaacagccgctttttcaccgccaagaaaaaggcgctgacgaaatctcttgccgctgcgcttttgaaaaatggccgcgccccgttgaaaggctgctactcggaaaaaaccgggaaaacctatgatgccgtcgttcttctggaggatgatgggcagcacacgggctataagctggtgttcgacaatggctgatgcgccgcgtatggatcacaagcagctccgccgcgccaagaagctcattcggaagctctgctgtaattacgatcacggcaactgcctcgcgctggatgatggagagccttgcgtctgcatacagggtatttcctactcgctgctgtgcaactggttccgaaacgcggtacttcccgccgaccatgagctgctggccgacgtgatgcgggaaaggccgggaaagcgctgcgccgtctgcggtaagccggtctattcttcctccaatcgcaccaaatattgccccgcctgcgccaagcaggagcgtcgaaagcaggacgccaaacggaagcgtaaacaatactggaacctccgcaaatagagactgggaaagccccgtgccgcaaggctttttccatgccggattgcaagtggctgcgtcattctatccgcaagcgcaaaaacggcctctatctgcggagaattgcccctgtgcaggatgtgttttcttctgcgcaggggcgctattttttctgaaaggagatcatcatggctgaaaaacaaaccaacaaagaccggatgcgggagatcgttgacagcatcgaaaatggcatcaaggagctgttcgagagcgataagtaccggaagtaccttgccaccatgagccgctttcaccgctactcggtcaataataccatgctcatctatatgcagcgccccgacgcaacccatgtggcgggcttcaacaagtggcgcgatcagttcggcaggaacgtcctgaaaggcgaaaaaggcattcgcatcatcgctcctactccctataagaaaaaggtcgaggaaatcaagaccgaccccgaaaccaatgcgccggtgctggacgcagacggcaaggccatcattgaggaaaaggaaatccgtatccctatgttcaaggtggtttccgtctttgacgtgtcgcagacttctggaaagcccttgccccagcttgccgccgatctgagcggcaatgtgcagcagtatgaggttttcatggaggcgctgcgccgtgcttctcccgttccgatggagataaagcccgttgcgcgggatacggacggctttttcagcattaaggcgcagagcatcaccatccgcgccggtatgagtgaggtgcagacggtatgcgccgccgtccatgagattgcccacgccaagctccacgactacgaacacatgacggagcttgcggacgatggtgagacgatccttgtccccggcgaaaagagccgcaacaccgaggaggtcgaggccgaaagcatctcctatgcggtctgccagtattacggcattgaaacgggcgaaaacagcttcggctatatcgccacatggtcaaagggcaaggagctgaaagagcttcgcgccagtctggaaaccatcaacaagacggcttccgagctgattacggacattgaccggcactttgcggagatttgcaaggagcgcggcatagaccgggagaatttggccgctgcggagcagccaagcgtggaagcgccagaggcggaaaagctctacatggtggacaacgacaaatacattcacgttcagcgcagcgacacaggcattgattacaccatctatgacgccggttccgcaaaagtgttggatggcggcgtactcgacggcaccgaacagcaactgtccacagcggcgcttgaggtttgcaaactccacaatattggcggtgctgcgccgatccgccttgcaccgctggagctgttgaaagacttgcaggaggcaaacgagttgcccctcggtgctggcgaacaaatcaccagcacagtcgttgttcccaccgatgcggcagataatatgctcccggagctggaacaggccgtcccgatgcctgaccccacgctgacggtggacgatatgcgcagctatgggtatctggacggcgatatgcttccgctttccaaggatcgggcgatggagctgctggagcatgacatcacggtttatatgctctatcccgacaacgccgaggaaatggtctttgaagccgaggacatcatcaagcacgacggaatgttcggcgtcacaagaccggattgggatgcggtcaaaggccatattcctccccgcgatgtggagcagcgttttttgaacagtcccaccgattctatggcgatctaccaactgcgccgggatgcgccggtggagcttcgttttgccaatctcggcagtctggccgcgccgcctgaccctgccaactatgaagctgtctatacccgtgaggtgtacccggacgatgataccggcagaatccttgaaaacttctactacatttttaacgacgagcgccccggcgattttgtgggacacagcctctccgtcagtgacatcgttgcgctgaaacaggacggcaaggtatcctatcactactgtgacagcatgggatttcaggagctgcccgcctttcagaaaccggagaattatctgaaagccgccgagatgtcgatggaagatgattacggcatgatcgacggcattatcaacaacggccccaaacagcccaccgtcgccgaccttgaagcacaggtcaaggccggtatgtccatctccttgatggatttggcagaggcggcacaccgggaaaagaagaaatctgtgctggagcagctcaaaagccaaccggcccaagaacgtccacacaaaacagcgcccaaaaagagcgcggaaaaggagctttgatatgaacatcacctttgaagaacgccagcttatgagcctctacaacaccggcacccgcacgggcttgatcgcggcgctggaggaaatgcgcggctacctcgctgcggatgaaacggagctgcgggagctgacggacagcgccatcgcaaagctgcgcaggatgagcgacgcggaatatgacgcgctcgacctgttccccgattttgaaaaggaggatatggatgccgagtaaagtacagctctatgcgcagatggcagaccgcacggcggagcagatcacgggaagctaccagaagtggacggcatttctgaccaccgccgcaaggctgtataagtacccctacaatgaacagctcatgattttcgcccagcgcccggaagccacggcctgcgcggaatacgacctttggaataagcagatgcgccgctatgtgcggcgaggcagcaagggcatcgcccttgtggataccagcagcgaccaacccaaactccgatatgtatttgatgtttccgacaccagcggcggcgagaactctcgccgcccttatctttgggaataccggcaagagcatcgtgaggtggtatctgcggcgctggaacagcgcttcgatgtttccggtgaaaacggacttgccgatcagttggagcgtgtggcggcgcagcttgtagatgaatactggcacgacaatcggcgcgatattgtcggcatcgttgacggttcctttttggaggactatgatgagttcaacatcggagccgcttttcggaacgccgccgttgtcagcaccacctatacgctgctgtcccgctgcgggatgcagccgggagattacttcgagcatgaggattttctgaacgtctttgatttcaacaccccgcagaccgtcgccgcccttggaacggccatcagccagtccagcgagctggtgctgcggcagatcgaagtcaccatcaagaattacgagcgcgagaaaatcgcggaaaggagcgaaagccatgagcgaactgacctacacccgcagcggggattatctgattcccgatctgagcctgaccgagcagccgcaggccccgctgggcaagtacggcaggatgcggaagaattacctgaaggagcatcgtccggtgctgtggaacagcctgctgctgtccgagaggctgtacccccatctgcgggagatcgacgaggcagcgaacaaccgactggaacagatgatgccggagctgatgaagtcggcaggcgtgacggaagcgctgaaagccagcgacccgatgaagtgggtagggctgatgaacacgctgaaagcgcaggccgaggaaacgatcctcacggagttggtgttcagctaaccatgttcgatgcccctgctggggcgcagatgtccttcttcccctcagaggcagaacaaattcaatccatcgcagaagcggagagtgtaacaccctccgctttttctatgttcatttctcagaatgatattgaccacatcctgcgcgcgggcggtaatgcggatgcaacgcggatgaaaattgctgcggaattctccaagcaaaaacctttagaggatcgcgcggcatttctgaaagctctttaccacggcggcaacggcctgattacggataacggcaggttttccgcatggtacggggacgatggtatccatattgcaaccggagatacctctcgctatcttcgctctgcacaagtgataggctgggcagatgcggcggagcgtattgaggaacttctggacggcggcacatttgccaccaatcttgaagtcacagaagccccgcgctatgagcggctgggtattgctgtggatgtctggaatctttatcacgatttctcggatgaagcaaaatcgctggggtatctgtcctgcttgggcaatatccatagcaccagctttccagaggaaacggagcgcctgacggatgatctgctgaatccggagtttcgggaaaggcttctggcagaacacagagtatttcttgacgcataccgtgagaaccgggagcttctgcgtttccatttccaccgtccgcaggcgcttcttacatgtatggaagatctgtcccttccacgaaaggaattccactccgatatggaggctgttccagcaaccggcaggtttatcaccgaagatgaaattgcggcttctcttgcaaacggaagcagctttgaaggtggaaagacccgcatctatgcgtttttccagacttcgcacacccccaaggagaattccgattttctgaaaaaggaatacggcatcggaggacgcacccatgctgtatccagagaaagcggcagctatgaagatcacggcagcaaaggcattgtgctgaaaaagaacggctgtgcagacattcagatgaattggaacaaggtcgcttcgcgcatctcggagctggttcggttgaaccgctaccttacgccggatgagcaggcagcctatgacaaggaaatggcgcaggacgccatgcggaacgcggtttataacgactataacgacgtaaaggcggcgtaccccgatgaaattgtgctgtatcaggttggggacttcttcgagctgtatggcgaggatgcgcgggcagttgcagatgatctcagccttgagctgacgcgccgcaatttggagggagtaggccgtgttaccatgtgcggcttccctgcaaaggatttggagaaatacgttgaaaagctgcgggaaaagcatgatgtaacaatttcgcgcattggcgattccagccatgaacacacggcatatacgcttccgtccatcgaccacgaggcagaacaggccatcaatgcctatgaagcggagttcggcgcggatgggacgcgggtgttccgcgaccccgccgccgagctgccaccacagcctaccgtgcgagagctgtttgacgggtacaagctgaccgtcggcaactcgctttccaaagatacggcttttgtcaatgcctgccgcaattcagaccgccagaacgcttatctggagggcgcggacgctatccgtcgtattgtcatggcatctgatgatctccagcttgtccgcctgtactttgatatgcccgcgttccataaccggctgcatcaggagcttttggaggaactgtatcccacgctcgcagcgacggtcgcaccatctccctatcagattacacaggaggacattgacaacgcgcttctggattggcacgacaacctaaagggcaagcaggaagtcgcactatatatgcaggcgcatggacgagaacgcagcaccgccgcatggctggctgcaaaatatggctgggaagatagcaaaacccccatgtatatccatgtaggaaatgccgagccggtgacgctcacatgggcgcaggtacagcggcggttggcacagctcatccgcgagaataagttttatgatgagaatgagcgactgcggttattttcacctgaccgatactccattcgtctgcatcccggcgagggcggaattaccggcatttgggatgaggtgttggaacggttctgcggagacggggaacaaacgctccgctttgcagaacagaataacgccattgcttacttggatggcatcaaacgggatatgggaattgagctatcccctccggcgtttacaacaccgcttggctatacttatcatattggagatcgtatttcatccatagagttagaccacatagcagcagtcggcgctatcacgcgtgtagatgaagatcacgtctggcacacgttaccgaacgcacccggacaggagccggtcagcatcgaccgcaattcctttgaacgctacctcgacaccagatatttcgaggtttctgaaccggagccgcagcgcgtcattgcggcgcagcacacagaacagccaaccccggagacgccgcaagcggttcaaacccttatggggcagcgcgtggaaattgatggtaagctctataatgttgattccgcagatgaaactgtcgcgcatctcagcgtcgtttcatcctccagcgagagcaatcacgagccggaacacagaaccgaaccggtttctgctgtcctcacacgaattgcagatcagggtcgtgagcttgcgccgaatatttcggcatatcaggcgcttcgtgcagagcatcccgaaaagctcatcggtgtccgtgtcggagaacggctgcttttttatggcgcggatgcaaaacgagccgccagcgctttgaatcgccgcctgctgcaacgcgatattcccggtatgggcgaaaccgctgtgaccggctatgattttggacaatgggcaagcgccgcaaagcggctgctggagcatggacacagcttcgtgtttgcgcagccaaatgaaaccgacggctatgatgttatcaacgaggccgatgccaaggagtatatccccattggcatggagctggagattgacggacggaagtttgtcattgacagcgtaaatttcggcacggatgaagtatctctgcgcgatgtgacttttcaaaacaggcagggctttcccatcttccgcgctgaacacattgcgtttatacgctcgtttgttgaagagcaggaacgggagcagccgcagcctgtcaccaaacccgtcgcgttctatcctgccgagaaaacgcacttgccctacgacatagaaatccaaacgctgcacatcccggaaccggagcatgacccgccctctgcggaacccgccgagcctgaaccgcccgccatgagcgatgaagaaaggctgattctggagcaggaagggcgcgcggcactctcggaaatgggcgagtttgtgcctgattttgatgatgccatctcacaggctgagatcgacgagcctcccgcacaccgtcctgcggtatctatccccgttgacggcgagtggcagggctttcccagcgttgccgctgcggagcaggccgcttacgctgactttaaggcggcaagccaccgcgacgcgcagaatttccacatcaccgatgatgcccttggcgtcggcggtgcaaaagcaaagtttcgggcaaatatggcggcgatccgcctcctgcaagagctggagtttgagggcttacaggccagcccggagcagcaggaaatcctctcccgctatgtgggctggggcggtttggcagatgcgttcgatgagaataagccaaactggtcggacgagtttgcagagctgtacgccacactttccccggaggaatacgctgcggccagagcgtccacgctgaacgcccactacaccagccccaccgtcatcaaggcaatctatgaagcggtcggcaatatgggcttccagagcggtaacattctggagccgtctatgggcgttggcaacttttttggcctgctgccggagcagatgcagggcagcaagctctacggcgtggagctggacagcattaccgggcgtattgccaagcaactttaccccaaggcggacatcaccatcgcaggctttgagacaacggacagaaaagacttttacgacctcgccgtgggcaacgtcccgttcggacaatatcaggtagatgaccgggcttataacaagctcggtttttccattcacgactacttcttcgccaaaaccctcgaccaagtgcgtccgggcggcgtgattgcgttcgtgacctcccgctacacgatggacaagcaatcgcccgaagtccgcaggtacatcgcacagcgggcggagctgctgggtgccattcgtctgcctaacaatgcgttcaaggccaacgccggtacggatgtggtttcggacattctctttctccaaaagcgtgaccgtcccattgagatcgaaccggattgggtacacctcagccagaatggggatggctttgccatcaaccgctattttgttgaccacccggagatgattttaggcaggcagacctccgaaagcacccaatacggcaagcaggatttcaccgttgtccccatcgaggggctggagcttgcagatcagctccatgatgccgtgaaaaacattcgcggcgcctatcaggaagcggagctgccagagctgggcgagggcgaacagatcgacacgtccatccccgcagaccccaatgtgaaaaactactcctacaccgtggtggacggcgaggtgtactaccgggaaaacagccgcatggtcaaaccggagctgaacgccaccgccgccgagcgcattaaaggcatggtcgcgctgcgggattgtgtgaatgagctgattgccctgcaaatggacgagtacagcgcagaaagccggattcaggaagcgcaggccgagctaaaccgcctctatgatgcgttctccgcaaaacacggcctaatcaatgagcgtgcgaaccgtcttgcgttctctgacgattcctcttactacctcctgtgttcgctggaagtgctggatgacgacggaaagctggagcgcaaggcggatatgttccataagcgcaccatcaagcagcagcgcagcgtagattctgtggataccgccagtgaagcccttgctgtctgcatcggagaaaaagcctgcgtcgatctcagctttatggccaccctcatgggcggcagcgagaaaatcccgcagatcgttgaggatttgaagggcgtcatttacaaggaaccaaacagtggcccgtttgacttggaggacggcggcgagcattgggcgaagggctggcagacggcggacgaatatctctccggcaacgtccggcagaagctccgtaccgcgcagcgcgtggcagcgcgcgacccattcttcgctgggaatgtggacgccctgattgctgcccagccgaaagaccttgaagccagtgagattgaggtgcggctgggtgcgacatggtttgataagaagtacatcgagcaattcatgtacgaaacctttgaaacgccccgctatctgcgcggacagatcgagatcagctatgtcccgtacaccgcagaatggcaggtttcccgcaagagcatggtgcgctacaacgacgtggcggcattcaccacctacggcacagaccgcgccagcgcctaccggttgctggaggatgcgctgaatctccgcgatattcgcatctacgataccattgaggacgcagacggacgggagcgccgtgtcctcaacgccaaggaaaccacccttgccgcgcagaagcagcagcttatccgggatgcgttcaaggactggatttggaaagacccggagcggcgcgaaacgctggtacggcaatacaacgaggaaatgaacagcactcgtccccgcgagtatgacggcagccacatcgttttctccggtatgaacccggaaatcaccctccgagagcatcagaaaaacgccatcgcccatgtgctgtacggcgggaatacgctgctggcacacgaagttggcgcgggaaaaacctttgaaatggtagcctctgcgatggaatccaagaggttgggactgtgccagaaatccatttttgtcgtgccgaaccatctgacggaacagtgggcgtccgagtttttgcggctctacccttcggccaacatccttgtcactaccaagaaggactttgaaacccacaaccgcaagaaattctgcgcccgtatcgccaccggcgactatgacgccgttatcatcggccacagccagtttgagcgtatccccatcagtccggagcggcaggaacagctccttcaccagcagattgaggaaatcaccgatggtattcaggataccaagctcgcaggcggcaacagctttaccatcaagagcttggagcgcacgaaaaaggggctggaggcgcggctgaaaaagctgcaagccagcgaccgcaaggatgatgtgatttactttgaacagctcggcgtagacaggatgtttgtggacgagtcggacaattataaaaatcttttcctctatacaaagatgcgcaacgtggcagggctttccaccaccgatgcgcagaaatcctcggatatgttctcaaagtgccgctacatggatgagctgaccggcgggcgcggcgtggtatttgccaccggcaccccggtttccaactccatgacagagctttacaccatccagcgctatttgcagcatgaccggctgcaagagatgggtatgggccactttgattgctgggcaagccgctttggtgaaaccaccaccgcgctggagcttgccccggagggctatactttagtaggacgataaataatgcgttcctaaattgaaaataggttatcaaagtcggttgcagaatttcaaaaaatatttttttgattctttgaaaaacagttccgctttgtatccctattttctcctattggtagagggagtaatacttttaataccaaaacagattacataaagaaaggaggataagagaatgtcaaggacttcaaagattacagcactctatgagcgtttatcaagagatgatgacctcaatggtgagtcaaattcaatcaccaaccaaaagaaatacttggaagattatgctcgcagaaatgggttcacgaatattcgccattttactgacgatggtttttcgggtgtgaatttcaatcgtccgagttttcaagaactgattaaggaagtagaagcaggaaatgtcgcaacgattattgttaaggatatgagccgattaggacgaaactatctgcaagtcggcttttatacggaagttctgttcccacagaaagatgtccgttttcttgcaataaacaacagtattgacagcaacaatgcttcggataatgactttgccccgtttttgaatataatgaacgagtggtatgccaaagacacaagcaataaaatcaaggctgtatttgatgcccgtatgaaagacggaaagcgatgtagcggttctattccctatggatataaccgattagcaaccgacaaacaaacgcttgtcgttgaccctgtggcttctgaggtggtaaagcgtatctttctgcttgccaacgagggcaaaagtccgagagcaatcgctgaattgcttaccgaagaaaaggttttaattccggcagcacacgcaaaggaatatcaccccgaacagtataatggaacgaagttttcagacccatatacttggggaatgtcaaccataagagcgattttgagcagacaggaatatcttggtcatactgttttgcgtaagtcggtcagcaccaatttcaaactgcacaaaaggaaaaataccgatgaagatgaacagtatgtattttataatacgcacgagcctatcatctcgcaggaactttgggacagcgttcagaagcgaaagaaacgagccaacagaacagcggcaagaggaacgcacagcaatcgtttaagcggttatctgttctgtgctgactgtggcagaagaatgaccttgcaaacgcattacagtaaaaaagaccgttcgttacagtattcttaccgttgcggtgggtatgccagcagagtaaactcctgcactgcccattcgattagtgctgataatgttgaagccttgatattatcgactgtaaaacgattatcaagatttgttctgaatgacgaagaagcctttgcaaaggaacttcaagtattgtggaacgaaaagcagacagaaaagccaaagcacaataaatcggagttgcagcgttttcagaagcgatacgatgaactgtcaaaacttattcgtgggttgtatgaaaatcttgtttcgggattactgcccgaaagacagtacaagcaactaatgaagcagtatgatgatgagcaggctgaactggaaacgaaaattgaggaaatgcaaaaggaactgaccgaagaaaaggcgaatacggttgatattaagcatttcatttctttgatacgcaagtgcaaagagccgacagaaatttccgatttgatgtttgccgaactcattgacaagattgtggtttatgaagcagagggtgtgggaaaagcaaggacacaaaaggttgatatttatttcaactatgtggggcaggtcgatattgcctacacagaagaagaacttgctgaaatcaaggcacaggaagaacagattgaaatggaacgactggcaaaacagcgtgagcgtgaaaaagtttaccgagagaagcgaaaggcgaaaaaactcgctgaaaacggtggagaaatcgtaaaagcaaaggtatgcccccattgtcaaaaggagtttgtacctacaagcaaccgacagatattctgttcaaaggattgttgctatcaggcaaggcaagaccaaaagaaagccgacagagaagcagaaaaaggaaatcattattatcgtcagcgtgtctgtgctgtgtgtggcagtacctactggcctacacacagtcagcagaaattctgttccgaagaatgtcaaaaacaaaatcacaacgaaaaatctttggaattttaccataagaagcaaaaggagaaatcaaaatgcaaagatttattacagacgaaagaaccggtatccagtacgaactcatcggagattattactatccctgcttgacgatagaaaacgaagaaccgcccactctcacaaaatacggaagaatgagggaaagatatttaagggaacacaggaaaatcttgtatatcaatctgcttacaagcggaaagttatatgaacaccttgccgatattgatacttcggcgtgtgatatggcggagtatctgataaaggaaatggcaagaaagcagggtgtgacggaagaactgaaaggaaaggatatgatgaaatggataggattgatgaacaatatccgagcctgtgcagatgagattgtattgaacgatattgtgtattcttaatagcataccagccgaaaaggaactgctgtcttaacggatggcagtttttctttttcgggaagtatttaagaagttattaagtcgtgagtataatcgaagtggctaagttgaaaaattcacaaaaatatggtacaatacgtctaaatcagcgagataaatccgaagttgtggaggtaaaatatagatgaatcaaggtagattttatgcactaatcagagatgatttaactttatcaaaatatgatggtggtaaatgggcattagaaaatatggattcaaattataatgatgttattaaaaatgctatggaagattatttaagtgatacaaataatagttatgataatacaagattaaaggaatttgctggggaagcaattagtttaattaatgattgtgtaaatactaataaaattagaaaataaaatagtagatggagttgagatagatggaatataaattattagaagaacaagatttggaacttatgctagattttgttgatgatgaaaatacaaaatataatgtagatgttttaaaaaaatttatagataataaaaatgattttggatttattgcaaagataaataataagatagtaggttttgcttttggttatattttattaaaaccagatggaagaaaagtattctatcttgacgctattgatgttatgccagactttcaaggcaaaggttatggaacaggtttaatatcatttgctcgtgattatgctaaaactattgattgttatgaaatgtttttaataacaaatagaagtaatatttctgcttgtaaatgttatgaaaaagcaggaggaataaatgacgcagatgatgaagtagtgtatgtgtatgattttagggaggaaaattaatggaaatagtacaagataaaataagaataagaactttgacaaatgatgattttcctttaatgctaaaatggttaactgatgatagagtattagaattttatggtggtagagataaaaaatatacattagaatcattaaaagagcattatactgaaaaatgggaagatgaagtatttagagtaattatagaatatgataatgttcctattggatatggacaagtatataaaatgtatgatgaactttattctgattatcattatccaaaaacaaatgaaatagtttatggaatggatcagtttataggagaacctgaatattggagtaaaggcattggctcaaaatatacaaaaatgatttttgagtttttaaaaaaagaaagaaatgctaatgcagttattttagaccctcataagaataatccaagagcaattaggtcatatcagaaatctggatttagaataattgaagatttgccagaacacgagttgcacgagggtaaaaaagaagattgctatttaatggaatataggtatgatgataatgttacaaatgttaaagcaatgaaatacttaatagaacattactttgaagattttaaagttgaaagtattaaggtaattggtagtggatatgatagtgtagcatatttagtaaatggagaatacatatttaaaacaaaatttagtgctaataagaaaaaaggatatgaaaaagaaaaagcaatttatgatttcttaaatcaaagattaaatactaatataaaaataccaaatgtaaaatattcatattttagtgatgatatttctatattaggttataaagaaataaaaggaacttttttaacaccagaaatatattttgctttatcaaaagaaaagcaagaattattaaagcaagatattgctatgtttttaagacaaatgcacgatttagattatagtgaaataagtttgtatacgatagacaataaacaaaatgttttggaagaatatcaattactcaaagacacaatatatgatagtcttactgatattgaaaaacaatatgtagaagactttatgcaaagattacatagtacaactatatttgatggtaaaaaatgcttatgccataatgattttagttgtaatcatttattacttgatgatgaaaatagattatgtggtgtaatagattttggagattctggaattatagatgaatactgtgatttcatatatttactagaagatagtgaagaagaaattggtgtatcttttggagaagatatattaagattatatggtaatattgatatttcaaaagcgaaagaatatcaagatgtagtagaacaatattatcctattgaaactattgtatatggtattaaaaataatagacctgattttatagaaaaaggtagaaaagagatttatataagaactcgcaaagatgaaaaattaaggaagtgatgatatggttaaaaactatccggaagaagtagaagaacaagttgataaaataaagaaagttttataaatggtggtacaaatggatatatatgatttaatgaaacaagttaatgacgcattcaatcaaagatactgtttcagcagtaaaagaaaaaatagtaagcggtacggctttactattttagacaatcccagtttgtcagtatcttaaatagaatatatgtgacagaaaacatcgtagaaatacggtgttttctgttacccaaaaccccacaatttcatacataaccacaggttagtacgaataccttgtgtgattttttgaaaggcttagaaaggcaattttgcccgattttcgccccgaaaaatgacagaaacaaggcagtaagtatcttccctgtggtttttttgttttcaggcggaaaggaggattgatatgccgagaatgagcaagaaacggaaacaagagtgggcgttgtttctgaatgaaagaaatcgcattacctacaacgaactttgcagaaagtgcagtaatgactgcaagcagagtttccgctgtatcgtagtgctttgcccgaagtatttatcgaaaaggagaacgaagaacaatgaagcagacggaaaatgaaatgaatgtaaatgtacctcttgaagttatcaaggcaagtgaaatcgaaccgaaagaagtgaaatggctgtggtatccgtatattccgttcggcaaggttacgctgttgcagggcgatccgggcgatggaaaaagcaagttaatgctttccattgccgccctactctctaagggcgaacctctgccctttactgaaacggaagaaaccgagcctatgactatcatctatcagacaacggaagatgacgcagacgatacggtagtaccccgatttaattcagccggtgggaatggagaaaatcttatcttcatcaaggaagatgaaaagtctttatcctttggggataaccgtattgctgaagcaatcgaaaggtatcacgcaaaacttttaattcttgacccgatgagttcctatatcggagagaactgttcaatgaacaatgccaacgaaacacgagcagagtttaatcatctgattgcggttgcgaagaatactggctgtgcaatcgtgattatcgctcatatgaacaagatgagagataccaatccactttatcgtaccaatggttctattgatattgcgggtgctgcaagaagtattcttgcaatcacacgcacaccgaacaaagaagcaccagcggaaagatatatggtgcaagtgaaatccaaccttgccccgacaggctctgcaattctctttgaggttgcagaaaaaggagtggactttatctctgaaatggaaatgacagcagaagaagcgttccaatcccttgcccctaaaatgggcagaccgaacgataaggaaatcaaggcaaaagaatttcttttggaaatgctgaaagacggagaaatgctttcttcggattgcgaagaaagacttgaagccgcagggttcaagaaatcgaccatcaaaaaggcaaagaagaaagcaggagttatctccaaaaagaaaggctttctgtggtactggtctttgccgatgggcgatataccgagagaataatgcaggctgtctgatgagtggacagtctgtttttatgattgaggtatcataaggaggtcaagggggaactcccttgcccacgacatctttgcagacgaagtctgaaagtgtcatagtgggttacacacattcaaagaatgttgtgtaatggcttcgcccctgtctggaaaggagagtaaaatggcaaaaaccaacaaggcagatatgagttgtgcaagggtaaaacagtacaccgcttctgatgtgagcaaggcggaaaggcacaacgaacgcaagaatgaaacctatgaaaatatgaatgtaattgtggaacgaataccctttaatgtgcatttcaaaaaaccgactgccccgacctatatggaacagttaaagcagatggaaacagacgggcaggtgtcgcttcgtgggttaaggaaagacgcaacactctttaatgagattgtgattgatgtgaacacgatgtacttcgagcgtaacggtggttatgaatacgcaaagcagttttatgaagaagcctatcatttcatcgaagaaaaattcggtgctgacaatgttatatcggcagtaatgcacgctgatgaaatcaatgtagcggcaaccgaagaacttggaaaagaggtttaccactatcatcttcacgctatggttctgcctgtggtggagaaagaaatcttatggagtaagcgttgcaaagaccccgaactgcgaggaacggtcaaggcggttgttaatcagataagccattcaaagaaatggaaatcggatattccgctgaccgatgaaaaaggaaatccattgctaagaaagaacgggaaaccgatgttccgagcttcgtacagcatactgcaagatgagttgtttcactatatgacggaacaagggttcaaaggctttcagcgtggcgaatacggaagtacggcagagcatttgacttccctgcaatatcaaatcaaacaggataaagagcgattggagaagttgcagaagcgtattcaaaaggaacaggttaagtatgagcctgcccgtcatatttccaaaaccttaaacgagattgacagtatggggcagaaaacaatcacaggtaaaatggcaatctccaaagaggattattctgagctgacttcccttgccaaagagggcattaccagtcgtgcggaaatcaataaattggagcagagtgcaaattattaccgacagaaatattttgacagtgcaaatgcactggaaagaatgaaaaccaaatacaacgaactgaaagaaaagtgcagaccttttcttgaagcgttggagcatttccccgaagttgctaaactttttaccgaaaaagtgaagcaacttttttcttttaaggaagcacaggaacgagccgaaaaagaagcaagggaaaaagaaagacaggagcgtatcaaggcacgaagaaacaagcgtggtatggaaagataaccatttccattgtacttgcaacttaatgacttcttgatatgttcagatgaaacaggctgtatttgtggggtgttctaaacggaatgccccacagtcaatttatgaaaaggagaaacggacgatatgaaagaaaacactttatcttatacaacacgaataggtaaaaccacttttattgtaaatgtgaagcaatcggaaagtgcgaagaagcctttgaatacggtgtttcaagaaatatgcagacacgagatgttgggagatttttcagcggataaatatttgaatttagaaaacttacaaaaatcatcttgacaaactcgttcccgagggaaccggctaccgggcaaggacgcgctttgcaaaatttttcaacttgcccgaattgatgaatctgttcaaagaggtcgccgacatcaaaacggcggatcagctccacttacccacgccggaggttgcgtatcacaccatcgccaccaaacccacacagatccagcaggacatggtgaaagccctctcggaacgagcgtccaaggtacacagcggtgcggtcagcccggatgtggacaatatgctcaaaatcacctcggacggacgcaagctggggcttgaccagcgcatcatcaatcccatgctccccgacgaagaaaccaccaaggtcaatcagtgcgtggcgaacattctccaatactggcgtgacggcgaggaggaaaaactgacacagcttgtgttttgcgacatttctacgccaaagaccacgccctcgcagcgggcggcaaaggcttcccccggtacgctggacagcccggaaatccatgcgctggagagcgcgatttcattggaggaaagcacggaaacgccgttcacggtctatgaggatgtgcgccaaaagctcattgacgccggtatgcccccggaacagatcgcgttcatccacgatgccaatacggaggtcaaaaagcgggaactgttcgcaaaggtacgcagcggtcaggtgcgcgtcctgatgggcagcacggccaagatgggcgcgggcaccaacgtgcaggatcgtttggtcgcacttcacgatttggattgcccgtggcgtccccgtgatctcacgcagcgaaaaggccgcatcgagcgtcagggcaatcagaacaagctcgttcatgtctgccgctatgtgaccgaagggacatttgacgcctacctctggcagaccgttgagaacaagcagaaattcatctctcagatcatgacctcaaaatccccggttcgctcctgtgaggacgtggacgctacggcgctgtcctttgcggagattaaagcgctatgcgccggtgatccccgcatcaaagagcgcatggatttggacatcgaggtgtccaagctcaaaattatgaaagcagaccacaacagcaagcaattccgcttggaggacagtctgctgaaatacttcccggaaaagatagaggaacacaagggctttgttcgtgggctggaggcggatatgcagaccctcgcggcgcatccgctcccggcagagggctttgtcggcatggagattcgcggcgaccggctcaccgataaggaaaacgccggtgccgcgttgctggatacctgcaaggaggtcaagggcaaagacccggtacagatcggcagctatcgcggctttaccatgtccgttgcctttgattccatgtggaaaacgtacacgctgacgctgaaaggccggatgacacatcgcgttgaactcggttcggatgccagaggcaaccttgtccgcatcgagaacgcgctggataaaatgccggagcgtttgcgcagtgttcaggatcagcttgaaaacctctataaccagcaggcagcggcaaaggctgaggtcggtaagccgttcccgcaggagcaggagctgaccgcaaagactgcacggctcatcgaactggatatggagcttaatctggacggcaagggacagccgcagcctgagcaggcgattgcaaaatcggcgcggccttccgttctggacaggctgaaagcgtcgcctgttcatggtgcaccggaaaagccccacaaaaaagaaatggaggcacgataatgaaaaatatcctcgtttacaaacacccggcagcctacgccagagagcatgacgagcttgctgcctaccgcgcctccaatcaggcaaacgcagcctgcaaggaagcgattgaagccgccatccgcgaccactaccgggataaccggctggatacagtggcagtcgatcaggtggtgcagcagttcggctatgaccgcacgttccatgtccttgccatcaccgtctgtcaagcggactgggacagacgctattctcccgacaacagggcttgggccaacgccatgtccatccccgccaatcctgacgcatggggtactgaccgcaactgctatctggccgtcagcagccatcccggtctggtcgatctgtttctcagccagacgcgcaaagcctacgcgcaggagcggcagaaaacctctgtccgggacaagctgaaaaagccgcctgaaacaacttcgccgaaaatttcggcgaagtccaaagccccggagcgttgagcgatggcaaaacgcaagcgggacattcagctcaaattccgcgtcacgccgcaggaacgggaaatgattgaaacaaagatggcacagttcggcaccaccaacatggcggcgtatctccgcaagatggcgattgacggatacgtagtaaagctcgatctcccggagctgcgggagctggtgtccctgcttcggtattccagcaacaacctcaatcagctcacccgccgcgcccacgaaacaggccgcatctatgaggccgatctggaggacattcagcaaagtcaggaacggatatggacggcggcagagaaaatcgtttcctcgctggcggcgctgaaataagtcgcaggggcggcggaatgaccgccgcccctgtccgcacaaaagccctgcattgttgaaaagcgcgtgttgtcatggtattctgatattagaaaagcataacgtctttgaaaaggaggccgtcaaatgtctattctgaaaattatccttgtgccgctatcgcttatcctgtccctgttcgtctggctgtgcgcggggctgctgtcttgctccggcttcgcgttcaagctggcaagcggcctgctctccctgttggccatcgccgtgatgattacctactctgtaaaaaacggcattatcctccttgtgctggcgtttctaatcagcccgatgggacttccgctgctggcggtgcagggacttggcaagctgcaagacgtgaacgctgccatgaaagacttcatccatagttaaagcgcaagccggggcgaacgcctcggcttgttttctcataaatctcgtttttgattttactcaaagagattgtaaaaactacctctctgtgctataatgtctacgaacgttagagaggtgagcattatgaagcactatgagaagctgctggaattaggctgtttcagcaaaaacgatctggagcagatcaccggcagcgaagctgcggccaaatggctttgccgggagtatcaaaagaaaggctacattgagcgcgtaaagcgggatttgtatgttgctatcagtctggaaactcaacagcccattgccaaccgctatgtgatagcctctcacatcagtaacgatgccgccgtatcgtatcacagcgctttcgagttttacggttacagcaatcaggtcttttacgaaacgcaagtgaccagcgagagccggttccgggattttgaatacgacggcgtgacataccggcggattgccccgcgcattactggcggtatcaccgagataaacggaacccgtgtcacaacgctggagcggacggtaattgattctatcaatctgtttgagaaaatcggtgggctggaagaacttttgcgctgccttgcgctgatccccgcgctggatgaagcagcgctttcagcctgcctcgcggagtatgaaagcggctttctctatcaaaaaacgggctatattctgtccgcctttgcagccagtctcggcctctctgatagttttttcgccatgtgcaaatcgcacctcccgaaaggaaaatcctatttatcaagcgagagccaaggcttcatctggcacgaggaatggaagctgtatgcgccgaaaaatctgatgcacatgatagataaaggggtaacagactatgatgcaatttgacagaatgtccttgggcaagaaagcccgtgaattgggcttcgtccgtgatacctttgaaaaggtttgccgtctggccgatgtgctggattttattcaaaaggatgagctgctttccaacgcgctggcgctgaaaggcggaacggccattaacctgactatctttaatttaccccggctgtctgttgacatcgacatggacttttctgagaatgttccccgtgaagaaatgcttgcaatacggaagcagatcacggagcggatcagtaaatacatgaccgccgcagggtatcatctgagccagaaatccaaaacgtatcacgctctggactcctttgtttatgagtatcaaaatactggcgggatgaaagacaacctcaaaatcgagatcaattatatgcttcgctgccatgtgttagcgccggtgcgcaggacggtcaatctgccttggctggaacaggagcttactgttttgagcgtcgatccgctggaaatctacggttcaaagatcgttgcacttctcaaccgcgcagctccccgcgacctctacgacatacatacaatgatggagtatggattgtttgacgaatcgcaggaacccatgctgaaaaagtgcgtcatgttttatagcgccattggctccgacagcgttccagaccgattccatttcgagcagatcgcctcggtgtcccagcagcgtgtcaaaaccgaccttatcccggtactgcgccgtggcacttggtttgatgcgcagcaggcgcatgaacaggtcatcgcctatctggaaaaactgctgacgccggacgaacgggagctttccttctggacttcgttcggccagcaggaataccgcccggagctgcttttccaagacgcagatattctcgctcgtatcgggcagcatccgatggcactctggaaatgcagcgataggcagaataagcccgcagcagaaacggactgaggtcagtatgaagaagcacggacattactgtaaaatctgcggcgagtataaggcaaacgaaaaattctctggcaaaggtcatgccgcccatatctgcaaagcctgttctactctgccaccggaaaagaaagctgagatgctggcaatcaaccggctgctgaatcttccgtggcagctttccaaagaacaaaaagattggttaaggcgcaggacgcatgatcgccgcaccgaggtcaaagcacttgcccagcagcaatacgaagtgcgttttggatacgcgcacacttgtgatgagctggatgatgcagaagaaatagaatagtgtaaaacggtctgcttcggcaggccgtttgacttttcaaggaggtgtccaacatggcaaccacgcgcctgatgcctctgcacactggcaaaggccgcacggtgggacaggccatcagcgctatcatcgactacaccgaaaatccgcaaaagacggacggcggcaggctgataacaagctggcaatgcgacagcaggatcgccgacgccgagtttcttttcaccaagaatcagtacatccaaaagaccggcagagtgcacggcgaggacgatgtgatcgcctaccatctgcggcaatcctttgtccccggagagatcacaccggaggacgcgaaccgtttgggctgtgagctggccaagcgcttcaccaagggcaatcacgcctatatcgtctgcacccatatcgacaaagcccatattcacaatcatgtgatctggaactccaccgcactcagccagacccggaaattcagaaacttttggggcagcagccgcgccgtgcggcggctcaacgataccatctgcatcgagaacggctactccatcgtggagaatccgaagcgccacggcaagagctacaacaagtggctgggcgacaaaaagaagccctcccaccgggagcggatatgcgcggccattgacgatgcgctggcgcaaaagcccgacagctttgaaacgctgctggagctgctgcggcgggccgggtatgaggtcaagggcaagaaagtcccgtccctgttaggcggcgaacagaaaaaatccattcgcatggataccctcggcgtcggttatactcccgcagatctccgcgcggtgattgcaggtgaaaaggcgcatacgccgcaaaagaacgtcgccgcgccggtcaaaccggaaaagcgcagcgggaatctgctggtggacattcagacaaaattacgcgctggcaaaggtgccggttatgcgcgttgggcgacgttgttcaatttgaagcagatggcacagacggtggcctatctgcaagaccatgagcttttagattacgccgttctctcagagaaagcggcggaagcgtccgctcacttcaacgagctttccgcaaggattaaggctgcggaaacacgcatggccgagattgcggtgctgcgggagcatattgtcaattacgccaagacccgcgatacctacgttgcctatcgcaaggccgggtactccaagaaatttcttgcagagcatgaaagcgagatcacgatccacaaggccgcaaagaactattttgatggactgggcttcaagaagctgcccaccatcaaggcgctgaataccgagtacgccgagctgctggcggagaagaaagcggcctacgccgactaccgaaaagcccgtgaggaaatgaaagagctgctgacggccaaggccaatatcgaccgtattctggagctggacaaggagcaggaggaagcgaatgaacgacgggaaaaagaggcagagcagcgctgagctgcctgcccataagcgatttgcaaaatcgcgcagccgatggatttatccatcgttccagaacacagtttttgtgttctgcggggattggggcagcgccccaacaagcatgaaacaggcgggctccgtgtaaacggaatccgcctgtttttgcaaagtgggtaccgctttgcattgcttgccgctttcttgcccccgttcgtacccccgttttcccctctacccatactacaatccgaaaggggcgttttggccagtttcggaggactttttcaaaaaatgtcgctcctatccgtaacttttctctgaacacttcgccggatgccttgtgtttcttcggatattcgtatataatgtatcgtgttgagtattatccatgcggaggtgcggtatgaacgggatcaagggctatatctccattcgggaggcgtcctaccgttggggcgtgtcagagcggcgggtcaaccaatattgcgccgaggggcggatccccggcgcgtcccggttcgggcgttcatgggcgatcccggaaaacgcggaaaagccctccgacccgcgctttcaggaacagcgccgcgatcccggcaggacaagcacctgacagactcccggctacatttgaagcagccgcaaaaaggaagtgaacgttatgacctgcgacgagagcttataccgccaatatctgagcggcgacgacgaagggctcaatgccctgatgaaaaaatacggcgaccccctgaccctgtatatcgacggctatctgcacgacgttcacgaggcggaggagctgatgctggatgttttcgcctatctgttcacgaaaaagccccgcatccgggacggcggcttcaaggcgtatctatataaggcggcgcggcacatggcgctgcgccataagagtaaacgaaagcccctgttcagcctcgatacgctgaccggcgagctggacgggcggctgctggcggaggaggtcatccggacagaggagcgaaaccgcatcctgcacttctgcatggatgaaatgaacccggactatcgggaagtcctctatctcacctatttcgaggatatgagctacgcacaggcggcggaggtcacgggaaaaacggtgaagcagatcaccaacatggtgtatcgcggaaaggaaagcctgcgaaggctcttagaacgggagggaatcacaaatgcggagtcatgaggaacgggtcgctgagacgaagcggcgcatcgcccaaattgagcgggaaaaacggctgcggcgcaatacgatcaccatggcttctgccgtggcggcgtgtcttgtgctgctcataggagcgtccctcgccatgcccggcattgccgcaaacatccagacaggcgactactccggctttgaaacggcggccagtatgtacggcggcggcgctgccttgggatacatcgtcatagggctgctggcgtttttactcggcgtgtgcgtgaccgttctgtgcttccggctgcggcagatgagccgtgaggacgggcagaacgaggaaagcgaggatgcgcatggagctgattgagaacctgctgcaactgctggtcacgttcgtgggtgcgctgctttcgggtatctcctaccggaaaagccgcaggcaggcgtattttctgctgctgtgcttctacggctgctttgcccttggttcgctctactggacgctgtatctgctgctgttcgacaccacgccgcgcgtcttttatgtgtcggagttcggctgggtggccagcgtcattttcctgcgcattttgcaggccacgctctccaccccagaggaacgcgccttccgctgccgcagggcatggcttgcgcctgtgttcggtgtgccgctgctggcgttctattgcaccttcggggacatcctctccaacctgatctggtgcggcatgatgatcgttctctcttactgcgccatccgggggcttgtctacaccaatggacagacgggcacggcgcggaatatgcggtggtttcacatcggcgtgctgtgctttgccggttcggaatatctgctctggacggcgggctgcttttggccggatacctcaccggcaagccccaccttctggtgcgatatgctgctgacgcttgccatattggggctgctgcccgccacgagaaaggcggtggaagcgtgacctatatcgaaaacatctttctctgcatggtgtccccgctgctggtagccgcattgtgcatgggcaggcggcagctccgcttcttcctgttctgcatggccgggatgggggtgtgcctgctttcggcctatatcaacaccttcctcgcggcggtgtgtcaggcggacgcccttgccgccacggcggagatcgcgccggtggtggaggaaatgatgaagctgctgccgctggtgttctatcttctggtgttcgagccggagggagataaaatcaaggctgcggcaataacggtcgccctggccttcgccacctttgaaaatgtgtgctatctcatccagaacggcgcagaccgcttctccttcattttcttccggggcttcggcacgggagcgatgcatgtgctgtgcggtctgatcgtgggcggcgggcttgcctacacatggcggcggacgtggctgaaggtggccggcacgtgcgggctgctgggcgcggccatcacatttcatgccatctataatctgctcatcgcccacggcggcgcggcgcagtacatcgcctacgcccttccggtgctgctggtggcggcgggaagatggtctgcgttccgcttatcgcagaggaaataaccgaacatttactccctgagagctgctttttggcggctctcaaatttttttgaaaaattttgcgttttgggtgagagttttttcgattttttgtacctatataagtgaaggggtttttaagccgcatttcaaaaaatccagagaggaggttcaaacgaaatgtacgataccgcaagacgggtcgcactcgtcaaacagcgggtgcgggaaaacgcccgccgaaggcagcggcgcgaggcaataagcctctccgcagcgtgtatgctgctgttcgcggcgctgatgcagacagcgggcacggtcgtcgctccgggacagaccgccgcatggggcgtgttcggcgcgatgctgctgcgggaggacgcgggcggctatgtgctggtggccgtcgtctcctttgcagcggcggtggtcatcaccgcgctgtgcttccggctcagaaaaagagaaaaccggagaaaagacgggacggataagccgaaccaacacgaaaaggaggagaaaagccaatgaagaaacgaatactcagtatcatgcttctatgctgcatggtgctgacgctgctgccgacagcggtctttgcagcggagaccggcgcgatggatactatccccacaaaatttgatgtggagatcgatctgtgcaatagaacgagcgacatcaacatcaaggacagcaagacatactatatctattcgtcctcaagcgatccggactttgtctggaccaagaagatccagatcaatggaaagaaggcggcaccgcacatttttctggacaacgttaacattcaggtgaacaaggacgccaagacaccggccatcgagctgcacggaaaggcgtcggcgtatctgtactttatcaaccgggacagtaagctgacgggggccaccggacgggcggccattcagaagaaccgcagcgaggggcagctgtgcgtgcaggtgatggagggcaccacggtgacatgtcagggcggctataaagcggcgggcataggaggaagctgggcgacccgcaatatcgcagaaagtctgttcaacctggatatgtacggtcacggcgcaaatatgcacttcggctctcagacgaacccatcgctctggagcggcaccatcatcgccaagggcggcgatggaggagccggcattggcggcggcagaaacggcagcggcgagaagctgtatttctactcaggtaaaatcgaggcgaagggcggcgaagcggcctccggcatcggcggcagcttcaagggccgcggccgcgatatctacatctacggcggcgatatttccgccaagggcggcgatggaggagccggtatcggcgggggctgctggaaatcgttgcaggacatggatggcgacaccgcagcctataatatcaacatttacggcggcaagatcaacgcccacggcggatacaacggcgcgggcatcggcggcggtcagtacgtcccggcgcgcgatatcaccatcaccggcggcgagatcacggcgcacggtacgcacggcgcggccatcggcggcggacgctggtgtcacggtcagaacatcaccgtgacggacgcgaagctgaagctgacgacaggatactctcgatacatctcggacgaggcggcagctatgggctacggcgatcgtgtatacttggaaaaggtatacgatatcgacgtagggaaaagatatataggagatcttgtcaggaaccccctgcccgaagactacaagtccatcaaaataggctcataccatggaaagctggtgaagctgaaggttgaggcgcaagccatcaaccgcgacgacgagttcgccctcttctggaatctctatgatattctgattcccaatgaaaacgggcgtatcgacgtgcagctgctgacgctgccgtacgtgaagaactacggctgggcgatcgaagcgatggagatggagctgatcgacgacccctgcaacgggaagcacgacttcggctgggtaaaccggcagtcgtgccacgtctgggcatgccggaatatgaaatgtcaggcgcgtgacccggtggcaccggagtccgcaagtaatggcaagcacgcatccagcggctggaacacggaaaagcaccagctgctctgcgatgtgtgcggccatgtgatggaaacggacacgaaggcgccggtgctggaggtgctgaaggacggcgagagctacaccgtcgaggataacatcaatggaaatcccggcgcgtacaccttcaccgtcagcgacccggcgctgaatggtgaagcgtcctccggcatcaagtcggtgaccatcaacggcgagccgcaagccggccccacctatcgtctccccgcgccggatggcggcaacaatgacgcgggagcggaatataccgtggttgcgactgacaacgcgggaaacgagactacggccacagtcagaacctacaggcggcaccacgtgaaggtcatcagcccggacggcaaaaagacctacgccgatctgatgctgccgcacaatgaatatctggtgctccagatcaggctgccggcgggcgtgtcggcaacgctgaccgatgaggcagacagggcgacaatcccatatgacaaggaaaacggagagttccgggtaggtctgatcaccaaaaaccggacgctcgtgctgaactattcggcgaagcatccaaaggtcgagcttcgcttggggacgggtcagtacttcacgggatataacgcggattcggacgaaccgtattatctcaaaggcgcgtccatggatgggaattcctatcagataggcatgtgggtcgacacggacgcgaagccgggctattacctcagctctcctaatcgctacacgcaggaagagctggcagcgcttgacgagtccctctggaaggaatacaagatagcggaagccacgccgggatcgatcgtgctgccatttatcttaatcacaatagacgccgcggagtataaagaaaacggcggttggtatgtctacgccaaagccacgaacccgacgggaacgacctatgtctctacgccgaagatgatcattgacgtcgagaacccgaaagccattgatttttcgaccggcaaggaactggtaagcaacggaaaatactggggagacctgcggttcacagtagaggactcatcgcccgtcacggttcgtcactatacatccccgggtgggaccgctgaacttttgacgccggatgaaaagggcgtttatacgatctcggcagagtatgacggcagcacccaacacatgcttgtcatcgaagacgcctgcggaaatacgacctcctacaagtcgttcaaggtttgctggaactacctgatcaatgtgcgggagaaggaccattgggatgcgccgcctgcgcagccgattcgtatttccaagggacagaatctgcaagaggcgctctccaatatcaatatcgggttttttgcagctgacaccaacggttggatacctgtcgatgtttcatggaagatcccggacgattatgatccgcagtcccgtcgggagcagacctttaccgtcctcggcacggtggttctggaaggcaccggagcacgctgcccatcaggactcgatgttgtcccgcgtccgggagaggagtggaagaagaacatctcggtgcaggtgaccgtggagggcgacccgcagtataaggtgacggtgcaggattgcgaaaacggcagagtcaaggtggtgaacgccgcgggaaccgccgaggacggcacgccactgttctttaagggcgagcttgtcatgctctccattgaccccgacgagggctatatgctaagcacgctgtccgtcaatggcaaccctgccgccgttgcggttggggacgatacctataccttcacccagccggagggagatgttaccatcaccgcagcgtttgaaatgcgcaacgagcataccgtcacttttgacgctaacggcggctccgagcctgaggagctgcccgaggaggtcaccaccgcaatgcccgctaagaagatattgcacggcagcgagtattctctgccggagtgcgagtttattgcgcctgaaaaccagcagttcaaggcatggcagatagacggtacggagtatccggtgaacgcccctgtggccgtcaccgctgacatcacagtcaaggcgctgtgggaggacgcgccgcctgcccctgtcgagtacatcatcaccgtgaccagcggcggcaacggaacggcttccgcttctcacgagactgccgtggtcgggacggagatcaccctaaccgccacgcccaacacggactaccgcttcaaggagtggcaggtcatgagcggcggcgtgaccatcacggacaacaagttcatcatgccggagggcaacgtggaggtcaaggccatcttcgaggaggacgcacctgcgcctgccgagtataccgtcaccgtgaccagcggcggcaacggaatggcttctgcatctcccgcaaaggctgttgccggcacggagatcaccctgaccgccaagcctgacgaaggctaccgcttcaaggagtggcaagtcatcagcggcggcgtgacaatcgtggacgacaagttcaccatgccggagggcaacgtggaggtcaaggccatcttcgaggaggacgcacctcctgcacctaccgagttcaccatcaccgtgaaaacggacggcaacggcacatcttccgcaagtcctgcaaaggctgcggccggtacgcaaatcaccctggccgctaagcccgacaacggctaccattttaaggagtggcaggtcatcagcggaggcgtgaccatcgagaacaataagttcatcatgccggacagcgatgtggaggtcaaggcaatattcgaggaggacgcacctcctgcgcctaccaatcccgccaagcccagcatcagcgtaacaggaacatatacctataacggctctgtgcataccgcgaccgtgaacggctatgattccaccactatgaatgtcaccggcaacaccggcacggacgcgggcgactataccgttagcgtcacatccaagaccggcaaatgggcggacggcagcactgaggccgtgaccgcagagtggagcattggcagagctttgcaggaaatacctatcggcttgagcagtgtcgcgccctccaccgagggcggcagcgacggcaaaatcaccggcgtgaccgacgagatggaataccgtatggcagacgaaagaatctatacggcgtgcagcggcacggagattgagaatctgtccgctggccattacttcgtccgctatgcggagaataataaccactttgccagctccgatgcggcgatcactgtgggtgagggtacgccgcttgcggattgcacaatcaccttcaacggcaacggcggcagcggcagcatggattccgtgaccgtcaaggtagagacgaattacatcctgcccgtctgcggcttcaccgctcccaccgatcaggagttcaaggcatggcaaataggcggcacagagtacaaggtgggagattcctacaccgtgcgcggggataccgaaatcaaggcgctgtgggaaaacagcgttattacccccaccacctacgccgtcaccgtcagcaatgacggaaacggaaccggcaccgcaactccttccgccgctgcggccggcacagaaatcaccctggccgctacgcccaacaagggctatcactttaaggagtggcaggtcatcagcggcggcgtgaccatcaaggacgacaagttcaccatgccggacggcaatgtggaggtcaaggctgtcttcgaggaggacgtgcctgcacctaccgagtttaccatcaccgtgaaaacggacggaaacggaacggcttccgcatctcttgcaaaggctgcggctggtacggagatcaccctgaccgccacgcctaaagagggctatcacttcaaggagtgggaggtcatcagcggcggcgtgaccatcaaggacgacaagttcctcatgccgaacgacaacgtggaggtcaaggccatcttcgaaaaggacgcgcctgcacccaccgagtacacgatcacctatgatctggccggcggcactgcggagggcaatcccgacacctacaccatcgagacgaggactttcaccctcaagaatcctaccaaatccggctataccttcaccggctggagcggcacggggcttgacggcgagaacaatatgaccgtcaccatcccaacgggcagcactggcaaccgaacctatacggcacactggcgttataatggcagcggccattcttacagctattacaccatcaaggcaactgccggggctggcggctccatttctccctccggcaatgtcagcgtccgtgagggccgggatcagaccttcaccatcaccccggataagggctatgctgtcgccaacgtcaagatcgacggcaagagcatcggcgcggtgaagtcctacacctttgagaatgtcagcagaacccataccatcgaggtcatctttatgaaagccaacggcaacccccagaccggcgtgtttgtggatgtagccaccggcagctattatgaggatgctgtcgattgggcagtggagaacggcattaccaagggaaccgatgatacccatttctccccggacggcatctgcacccgtgcgcaggccgtgaccttcctgtggcgcaccgctggaagccccgcctctaaaaccagcaccatgcccttcaccgacgttcctgtgggcagctactactacgacgctgtgctgtgggcagtagaaaacggcatcaccaagggcaccagcgacaccacgttcagccccaacatgacctgctcccgtgcccagatcgtcacattcctgtggcgttctgagaagtccccggcagcgggtacagccaatccctttgctgatgtgaagtccaccgcctactatgctgatgcggtattgtgggcggtcaaggagaacatcaccaagggaaccaccagcacgacattcagccccaatgcggattgcaccagagcgcagatcgtgaccttcctctggcgctgcaagaagtgaccggctgacatacggctaaacatcaaagccgctggcatgaccccataagcgaacatcggacagcgcagcggacgggcatctcgccctgaagctgcgctgttctcttttcgctacaagaaacaaatcaatgacattttgagctgcgccgctatcccagcgcggcaaggagacagcattatgaaaagaatcacaagaatcattcgtccgatcatctgcatggccgtccttctctttgccatgaccacggcagtcatgggctgctatcagaaagggacggagcctatcgacattcccgacagaacgccttccggcacatctgcgtctcagccagcagcgactcccgcgggcgaagttatcccctcggtggacaggcaggcagagttggcggaagccagagcgaagaatcccgacaccgtggcatggctgtatattcccggtgcggaggtagacgatcccgtgatgcaggcggaggacaacggctattacctgaagctggatgaaaacggcgagtatgccatgtggggctgctattatgcccattgtgaaaacgaaattggcggcagggataagctggacaaaaacaccaccattttcggccactccgccagcaactgcgacccggacggtgtgcggttcaccaagctctaccgttatatggacgcagactttgtaaaggagcatccgtatatctatctctctgtggatggcgaggacatgattttccagatcaccgcgctattcgtcacggatattggctttgactatattgcgcctgatcccacgggagatgatctgaccagcttctttgagacgattgcgcggaaaaactggcttgactttgatggcgtgaccttctccgaggaagataccgttctgaccctctccacctgctgccggaagtatgacaaggccaacagcggcaatcagcggctggtggtcatggcgaagctgctgccggagggggcaaccgcgcaggagttcagcgtatcccttgtggatagtcctgaaatgccctaaaagaaatcagaatacgacgataacaggacacccatccttgcggtactgaaaagcagcgtatggtatagggaaaacggcggctgctctgtacggggcggccgttgtttttgctgtcccaacatttttcagatgaaagggacctatgcgtatgacaggagagcacaggaggtgccgctaatgctgcggcaacaagccgcgccgggagcatagccggacgatacccggacaccgtaggatacctatgccctccgacagccgccgacaatttccatactgaaccgcaccgaagcgcccatgcaggcttttatgcctgtgtgggcgctttttgtcgttcccggcactttttcgccgtgggctgccgctccccgccgcccttcgttcagacctttttacccactcggatctgaacggaggaacaaaatgtttaatagaaaaagcatctatgcgctgaataagaaagaccccgatgccatcgtttatatggacgccaatgaagtcatcgtccgcctgacccgcgaggactttgccagcgagaaagaatttctgaaatggaaagccctgtcggacgaggactatcacgcctccgaaaaggaagctcacgtctatgccaatcacacgcttgcgttggatgagctatccgaggaagcggcctccattcctgccgtggatgtctgcatggagcaggcgcatgaccgggcagaggcaatccaccgcagcgtcagaaaggtcacgcagattcggaagcacctgacggatacgcagttccgcagggtgtggatgtatttcgtggatgggatgacggttgatgagattggcgcagccgagggtgtcagccatcagaatatttccaagagcatcggcgcggcgatgaagaaaatgaaaaaacttttccctgattgctgaaaacagggtgcaaaagtggcccaaaatcggcgataggtgaagggacattctccacgaagcctttcaccgaacgttgaaaactgaatagaccatgatgcaggcacaaaacccgcgtgatagcggcataaggtgcgccgccacgacgatggcttcaaggaggtgattccggaaaagccatccgagcgatctacgcagccttagacccgattcggcaaatcgggcgcgatgacagcgcggcggataatgaaacttgctcacgccctcccacagacttgagggggaaccctgcggtatgcgccagctctttgaggcagcggtatcgtggagttatgacagccctgccaagggcggcctgcatcatgcccactatccggggcgcgtggcaaataggatggatcttctcaaatggacaagcagagcggctgcgccggtattcgccattatgttatgtggctccaattctgcccgcgcagccgcctctcaaagtcagataccatgcgctgatggcctttcccgtcagcgcattcatgtgaccttgaggaaacccaccaaaccgagaaaggagatcgccatgatgcagccgacaccaaacgaaacccaaatccacacggatgaactggtggacatccgggaagtatccgtagacaaaaatcttcccaaggaagaacgcattgccgcctttattcgccagatcaaaaatccttaccgcttccgctgcggcgatttcgtggtaaacgcctgcttcgccgggaacggtgttacgttggaggaatgtctgcaaggcattttgcgctgagcgacatcctcgcttttttccgcagagagtgctatgatcggtgtggaaaaggatgaaaacctaatagccagataaccactcttttcatgcgggagcagtccgggagaaaggagtgctttttcatgcctaaattcaaagccaccgcttatatccgcctgtcctacaccgacgatcattccagcgagagtgacagcgtttccaatcagcgcaagctcattgaaaactttgtggagcacaacccggatattgaggtcgtttccgaaaagatcgacgatggatacagcggcatcatcttcgaccgtcccgcattcaaggaaatgatgcaggatgtcaccgatggaaatatcaactgcgtcattgtaaaagacctctcccggctggggcgcgagtacattgaaaccggccggtatctgcgccgggtattcccggcctatggggtgcgcttcatcgccatcaccgacagcatcgacaccgcccacgacagcggcgatgatctggccgtatcggtcaagaacattatgaacgaagcctactgccgggacatttccatcaagacccgttcttctctggacgtgaagcggcgcaacggcgatttcgtcggcgcgttcccggtgtacggctacatgaaagccgaggacaataaaaacctactcgtccccgatccctacgccgcccgcgtggtctgcgacattttccgtatgcggctggagggcgcaagcgcctccaaaatcgcatcggagttgaaccggctgggcattctctctccgctggcatacaagaagaacaacggtctgccctacgcgaaaaagggatacgcagacaaggctgactgcaaatggtcggctaccaccattatccgcatcttgcaggacgaaacctacaccggaacgctggtgcagggcaaacagggtacgccgcattacaagatcaagcagatggagcagcgccccgcctccgagtgggtgcgtgttccggatgcccacgaagcattgatcgcccgtcaggattttgagctggtgcagcgcatcaaggggctggatacccgcacttctcccaacgaggacacggtgtacctgttctccggtatcctgatctgcgggtgctgcggaagccgcatgacccgcaagaccaaccgtgcgaacggcaaggagtaccactactattattgtcctaccggcaagaaaaagggctgcgcccatccggtcatgctgaaagaaagcagcctgatcgactgtgtgcgggacagcctgaaagcctatatcggcaatattgcttctctggaggcgctgctgaccggcattgaccagtccagcatcaatcaggcgcttgccaaggaatacagcgaccacatcaccgacaacgagcgccggttggagcaggtgctggagttcaaggcacggctttatgagagccttgtgggaggtatgcttaccaaggaagaatacgcttcctataaggcaaagtacaccaagcaggccgaggacatccgcgagagcatccgcgttctcaaggaaaaactcacggaggttttggaaaaccggagtgagcgcagccgctggatttcgcagtttacgcagttctccacgctggaaaccttagaccgcagggcgctcattcacatggtacagagcatccgcgtccgtggcaaaaaggagctggatattacctttacccatgaggacgaatacaaaaaggcgttgcagcttttggcgctggcagcgcagcagaaagattacgaacagagaaaggtgggctgagcatggcgagaaaaagcaggaaagaaacggctgcggtagccgtgcaggaggccgacgccgcttgccgcgccgcgatctacgtccgcctttcggtggaggatacccacacgcacagcgtatccattgaaacccagcagatgattattgcccgctatctggagcagtacccggagatcagcgtatacgatacctatatcgacaacggcgcgaccgggacaaacttccaccgtccgggctttcagcagatgctctcggatattgaggccggtcacgtcaactgcgtcattgtgaaagacctctcccgtttggggcggaacaccattgacaccggctactacatcgagcagtatttccgcatccgcagcatccgctttattgcggtcaatgaaaacttcgacaccgccaacccggaagatgcccattccggtatcatcatcccgctgcggaacatgataaacgaagcctacgctttggacattgggcgcaagatcagggcacagcagcggcaggccatgaaggacggcaaattcatcggtgcgcgtactccctacggctacctgaaagcggaggacgattgccaccagcttatcatcgaccccgttgccgccgtcgtggtgcagcggatgttccgttgggcttccgagggcgctggcctcaataccattgccgtgcggctgaacgaagcgggtattctcacccccagccactacaagaagatgcagggcaagatcacccatgaaaatttgctcggcagcggcaagtggcaaacccgaacggtcggcgttattctccgctccgaggtctacaccggagatctcgttcaggggcagaccaaaaccgtggatcaccggcaggtcaaggccgacgccgaggaatggacggtggtgcgggacacccatgaggccatcatcagccgggaacagttcgcggcggtgcaggaaattctcaatcagaccgccagccgcgtcaaggcgcgggaggtcaaagccttcacgccgaatcatctcaaaggcaaggtgttctgcgcccattgcggcggcagcctgcaccggcagagaaacatccgcaagaagtccgacgatgtgtacttctaccattgtctgagcaggagccgaatcagcaaggatgcctgccccggcgtgaccatccgcgaggataggctgctggatatgttggcagatatgcttcaggacgcgcttgatacggcgctggggcaatacaccctctcccttgcagagcagccccggcaggccgctgactgcgccgcgctgcgggagaaaatcaccagccgtaagcaggaaatccagcggctgcgcggtatcgtgcggagcttatatgaaaacctcgtccaaggtgttcttaccaaggaggaatacttcgactacaaggaaaagtacgaaagccgcattgccgatcttgccgtggaaatggaacagttggaggacggtctgcggacaatggatgcccaaaccaagcagcaccgggcgctgaaacaggatgctgcacagatcaaggccgaccgtgcgctgaccggtgcgctcattgagcggctgatcgaccgcattgaggtatcccacaataagcagatcacggtgcgctatcgctttcagagcgagtttgaaacctatgcggaggtgctggaacaatgcagaaatatgtgatcgccctctacatccgcctctccattgaggactacaagtacgacagtctgagcattgaaaatcagagccttgtcctccacgagtacgcggcttccatgcccgaagccctgaacgcggagatcatggagttcatcgacaacgggtacagcggcacgaattttgagcgtccgcaagtacagaagctcattgggctggtgcgggccaatcagatcgactgcatcattgtcaaggatttttcccgcttcgggcgtaacagcattgaaaccggctacttcatcgagcgtgtgttcccgctgttccatacccgcttcatttccatcagcgacgattttgacagcagcaaattcaagggtgacaccggtggcatggacgtagcgttcaagtatctcatcagcgaatattacagccgcgatatgtccattaaaaccaagagcgccaagtacgccaagatgcagcgcggcgagtatcagagcaaaatttgtccctacggctaccgcaaaagcgccgatggcagaatggagcctgacccggaggccgctaccgttgtgcagcttatcttccagcttgccgccgaggggatcaacgccaccgctatcacgcgggagctgttccgcagaagcatccccactcccggccagtacaaagcggcgcacggcaatcatacccacgatatttcccgctgtcatggcatctggagtgcgtccaccattctccgcattttggaggacgaacgctacaccggcgtgtatgtgatcggcaagcgggcggttctcgaagtaggcggctccagaagccgcctgaaggacagagaatcatggtacatcattcccgaccatcacccggccatcgttgagaaagccgtgtttgataccgtgcaggccagccagctccgcttttcccagccaaacaagaaaaagcgggactacgcgctgaaaggcaaagccttttgtggctgctgtggtcatgcgctgtcccgtaccatgcagaaaacctcgtattactactgccgccattccgaagcggacaaagaaagccgctgccacaagatgcggctgaacgccgcagagctggaacaggcggtattcctgacgctgaaaaagcagatggaggccgccgcgccgcctgccccggatgatatgcttcgggtggatgcttccgtaccggaacgcgccgaatatgagcagcagattgaggcgctgcaagacggtaagtgcgccttgtatgaacgctatctcatgggcgagattgatctgaacacctacaaggcggaaaaggccgcgtgtgacgagctgcttttgaaaacaaaaaacgcctatgccgcagtattggcacaggcgaaacagaagcaggacgaacaggcacggcaggacagccgcaaggaagcgtccaaggcgattttcgatgcggacacgctgaccaccgagctggccgagctgttgatcgaccgggtgctggtatatcccgataagcgcatcgagatcgcatacaaaatccaagacattttcgattgaggtggcagtcatgaaaatcgctttctattgcagagtggacggacagggctttggctttgtcctccccgatgaagctgacaagctccgcgagtttttcgccgagcatcaggataagcctgcgcttgaaaagccatcgagcgcaagctaaaaatttttgtcgtgtgcttgacatacgggtggcggagatcatggaagcgtacccgctcacagcccgcgtggtccaacagcctgtgcagccgctggcgcaccaccgagggcagcaggggcgagtcctccttcttgggggacgggaacagccatctggaaacattccttttccggtactctctgaacacctccagcactttgggcggtaggagcagagtgcgtaccgccgcctttgttttcggctcggtgaccaccacctccgagcctatgaccaccgcctgcttgctgattcgcacttcgcccgtggtcaaattcaggtcctcccattgcagggccgtcagctcgcccaaccgcagtcctgtggcaaattccagcaggaacaactcgtagtacttttcctccttcgcctggatcagcagcttttgcatggactcccgcgagaggagattcatttcccctttttgggcgggcggcagcttgcatccggacgccgggttctgtggaatcaggttttccgatactgccttttccagtgcccgccggcacaggctgtggatgttgcggagttgggagtccgccagccccgttttaccgtccgattggtccgcacgcccctccgttttcagccaggcgaagaactgctgcatatccttcgcggtcagcctgttcagcgggatatgacccagtcccgggctgatgtacagccggaggtagccttcgtagatccgccgtgtgctgggacgggcggcgggtctgctgtgcctctcataccagtgctccatccaatccccgaagggcatatccgccttgatcctcggcggcgcaggcggcgcgagggcgtccttcagcgttttcagcttctccacacactcagattttgttttagccagcacatttttcgttttcggcagacccttgtcatcgtagccgatgaccacacggccctcccatcggccgtcctttctcaggcggacagttccttctccatttttccgttttcttcccacggtctcagctcctctccgaaaatgtctgtgaggaattcccccacgatctctgccgccctcttttgcatatcgccggtggtgtgggtgtaggtatccagcgtgaatgccgctcttgtatggccaaggatcccagagagcgttttcacatccacgccggaggtcagcgcatgggtggcgaaggtgtggcgcagatcatgaaagcggatgtcaggcagtcccgcctgctccagcagcagcttcatgcgccggtaggcggcgtccggggcagtcggccgctccgggcggagcaggtccgggaatatccaagctgtcttcgccgcccgctttctctccttcagcagcaccgcaaggctgggcggcagggtgatcgtccgtgtccccgcgtaggtcttggtatcgcctgtggtaaggcccttgcccttctcccggcgcaccgtgcggcagattttcaaggttccattcgctgcatcgaagtcctcccaccgcaggccgcacaactcgccccggcgcatgccggtggtaagctctgtgtagaagaggtcatgccataaggcgtccttctgaatggtctccaggaggcggtcgacctgctccgccgtcagtacctccttttcctgatagctgaactttggcggcgtcacctcctccacaggattcctcggaacgagccgcgcctgtgccgctgctttcaggatcccatggagcgtggtatggatgcggcggaccgtgccgctggccagcttccgggacagcatatcataaaaccgttggatgtccactgctttgatttgactgatccgcttctctccgaggcagggacggatatggttctcgatgtagccgcggtaaccattcagggtaccgggccgcaccagcccctccttgctcaccagccattgatccagccactcggacagggtgagcctgctctgctccgtcaggtcgacgccctgataggcggtgatgcacttccgcagccttgcggtcagctccttttgggtgtcggcgtagacatagcggaagatggagtcgccgttgtccttgtgcccaactacgatgcggccctcccatcggccatcctcccgcttgcgcaccatgccgtcaccggatggtcttcgttttgccatgtggtttcacctccgaggttttttctttgattaggcgcagcagctcctgcgtggcctgaggtttattctgtaaacacacaataccgaagacgcggagagaaagcgagtggaatccccggcaccggcgcaagttctacgaaagcaacaatccgaccacgccatcctctcccgcgatccggctttacttcggacctaatcaaaatccggcagcatccgctggatgtcctgagcatcctcaaacctgatctgcccgttggtgcgcttgacctcgtccgtcacatagccgcgcagggcgcggcggtcctccatagcgtcgccgaagtgcgcggcgatggtgtgggccatgatgccctgctccaccgcgcacttgaacaggaggcagttggtgcggttggtgctgtccgccacgatcccgcgcagcgtcgctgtcagcgcgttggggaggtactcgcttgcatcctccgcgcccaggtagcccatgtagaagtgcagcgacttctcaatgaactcgctgcggcttttacagttggcctcctccagccagccgtccatgcggcggatcgtcgagggtctgagccaagcggggatccgcgtcttattctcgtgttccatattgatttctcctttttctctggtgtgacaccgcgcaaacccgcacggtgtctggatttttcgtcttttcgaccacctgagacccgcaagaagtcccaaaccgacctcggagcggcatcctcggaaagccccgcactgcggggctttgtgggcgagaggggtcgctttgcgaccacctctctttatcttgtgcttttatcgaacaggtgggtttcagcggaactcgccatagccagggggaaagcggtgaacccatgcgccctgttctccctttgcgcttgtgtcagaaaagcagcaaattcggcatcagcgagacgggggtggtatcactaccctcggcgtgggccgcgcgctcccgaaaccctgcgcggccgcgggtcaggagggcgtattttgccgttttacgcgctctgctctcccgctgctggagtgaacgcagcgcccagcttttcggctcttgcctgtgcccgctgccgttccatggcttgccccgccttctccagctgacgctcataacagagggcgagggcattcttgatcggcaggatggtgtacctgagacagccgttgcgcttgagaccgtccctggtgatgatctccgtgcgctctgttcggatgagcccatgctcctccagcgcagcaacatactttgccacggtgttgaccgagatacccagcttccttgcgatggtggggtagctgacgatgcattggtaggtgcggcgatcctcaatgcggaggaggtaggcgtagatgttgatctccaagtggtgcagtcccagatcaaagactgcgttgggaacgggaaagaaattcttgatggtgtccttcttcacatagggcgtgttcagcattccgatgcccctttcgtgtgcgcggtgatccatttccgcagttcctccttcggaacgacgatgcgcttgccgatccgcagagagggaaagtcatcctcctgaacgagttcatagacgctggagtccgagactcccatgagatccaccacctgcttcacattcagcagcaggggcagttcatcatagctggtataaatgcttttcttcaaatcgtgtcctccttgcagctttgtcggtagagcgtattcagtttttgtcggtaatgtgtatttcgatctcacccccctatgttttttctctgctgtgcgccgcgccctcgctccgttgatgcgctcccccttcgcgggatcgtggcgacacttcgcccggagcatccgggctgcggcggcagggattcacttttcaaggttccaaaaataacggttgacatatctgccttaatagattagacttatttcataaagcccgtttcctgcgtctacttctgggcatactataacatgtcaacaccccgttgtcaagtcttattaaacgctatgtatttcatcagtctaatctcgttttaaggagcgtccattatgcatacctacattttcagaacctacatcgacggcggcagggagtactacgagtacaccgatgcagcggacagagagcagaccataaaaaaagactttccgtttccggaaagtctgatgagtctgctgtatatggatatctgggagctggagcccatcaccaggaagatggacagggcgttgctgtctttttatcagtccagggacaacaacgaactgcaaaccgtagtggccggtttgaatgaactggcgccccggcatatctgctttgagctgctgcggctggactggctggagcggctggatatggtagacagtaccgcgcccggagattttcaggacttgctgccccacaagaagatttcccatctctgcagcagcatcgacaccatgcagaagcagatcaaggggctgatcgcgcaggtgctggacatggacggggagaagaaatccgtatccgagaagatggtggcctactacaatgccgagggcggcgacacattgtacactttccagttccagccacagcctgtcaacttcgaggtcatcgacagacggatctttgctgaggtgctatatcccaaggacatctatgacctcatcgaccaccatatacgggagtgcgtgaagcgtgaggtgaggatgcgggtatgcaagaactgcctgcgctacttcgctgtgacgggcaaggccagcacggagtactgcggccgggtctgcgacagcaagggccgcacctgccgggagataggggccatcaacacatggacgcagcgcaagcagggcgatgaggtgttcaaggaatatcgcagggagtacaaaaagcgtttcgcccgcatcaacgcaggcaagctgaccaagagtgcgttctacgcctggagcgaggaagccagaaggaagaaagaggattgcgacaacggcacgatcacaccggaggatttctcccgctggctgaaggagtcgtgagaagaatatcatctttttcaagggggttatcgtattccgttttggcctttttaaggcatctccggttctggagcaaggcgcacggtgaagtcctgcgctacagcaccctccggcagcagcttcgccatgaggacgagccgctggttgccggtattgtactcatcgtacttccggcagcaggtggaaagggtcagcacggtgtcctcctcgccgaaggttacaccgtcaaattccagccagttcttctttgccacctgctcaaagaagtttgtcagctcctcgcctgtgggatcgggagcgatgtaatcaaagtcaatatccgtgatgaagcaggctgtgatctggaagaccatgtcctcgcctttcaccgagaggtagacatacgggttctccttcacatagtccgcatccatataccgatggagctttgtgagctttggcccgtccgggtcgcagttgctggcagagtgaccgaagatgacggtattcctgtccagcttgctccggctgctcaaacggttgtcacagtgggcgtagtagcagccccattcgctgtagttcccgttctcgtccttttgcaggtagtaagcgttgtccttcgcctgcaccacggggtcgtccacctcggcaccgggcatatatagccacgccacggcgtcggcgtatttctttcttgcgtccttcagctccttttgccggtccacggtggggatgatctcgccggtgggctgtggctcggtcacttcgggtacgctgggatattcctctttctgatggcaagcggtggcactgatcgccgtccccatcagcataatggcgacgaaggtgcaaaacagaaatcgagtgatctttttcatagtgttttctcctgccgcgtgggatggcggcatggctcatgggttgtgaatggcgtacagagtttcctgtggcgaaaaggaaacagcgcggaggccggtgctattgaccgtccgccgcgctgtcctttgctttttgggggagcagatgacagtgtaggagtatatccggcatctgctcgttgcgggtaaagagatatctgctgccaatagaatcattcgtgagaatacagaagagagagaacgctttctgctttcgagcaagatcgaaagcacagcaccgcagaacttctgtcatcttcccaagccgtgcgcagcgcaaagggctccgtgataaactgaatgtctggcagcattagaaaggttacggggcaagtcaccgttaggtctgctgtcaattggatcgttctgataagcaggacccgatcgcctttcttagcccgctctgaaggttttccatgaaatagcttatgcagatccatctcgcttgccgcgaggtgatagcatttcagcgggtgcatacgtcatccctaattacttgctgtgagcacggtacagaaaagtcacgatttgtgcgcgggtgcagccctcgtcaggactgaaggtggatagcgttgtcccgaccgtgatcttatgcttgaccgcccacagcacagcgtcgatatagtaggcgtccgcggctacatcggtaaagggattggccgtttttgcagagggagaattggctgctctccacaagaaggtcacaatatgtgcgcgggagcaggtcagctcggggctgaaggtcgttgcgctcgtgccaacggtaataccgttctccacagcccacaggacggcctcgtaatagtagctgccattcagcacatcctcaaagggcattgcttctgtttttggtgtggggcttccggcaactctccacaggaacgtcacagcctgcgcacgggtacaaatgccatccggcgtgaagtaattattacccgtgccggtggtgattccatttttaaccgcccagtcgaccgcttcctcatagtagctgccctccgctacatcgacgaatacgccggtctgggggttgccgtttgccttcataaagactacctcgatggtgtgatccttcgtgacattcttgaaggtgtaggacttcacagagcccacgctcttaccatccaccagcaccttggctacggcgtagcccttgtccggggtgatggtgaaggtctgatcccatccgtgacggacggaggtccagccggagggagagatagagccgttcaagccggagatcgccctgatggtgtggtaggtgtagccgccaccgccgccactgctgccaccgccgccgatgtaggtccagtgggcgtacacagtggtgttttcatagaatacagtagcggtcgtgatcttcgtgccgccgcttgccgcggtgtaccagccgtcaaagctgtatctgccgctgtgggtggcggtaggcagctcggggagcttttggtcaatggtagtcatgctggtaacggagggggtgccgctattgccattgaaggtgatggtgtaccgttgcccctggtggttgttgcactgcacaagaacctccagaggggtaagctcccctgcgggcatccacttccccacggcagagttatagcgcatctgaattttcagattgtccgtggcttggttgggtgccacgctgtgggtgatgcccgtgtcaatggtgtactgcttgctgtacaccgaggggataagggtaagggtcgcctggctggggtcgttgggatccggcataatggagacactgccggggaggatgccgtagttcttgaactgtgttctgtccgtgctgcactgcacccggacctgcacctgctccaagccgccgacattctcctccgtgggatacggcggagtctgcaggtcgtggctattgcacttcacgtagatcaccagaggggtaatctcctctgcgggcatccacttccccacggcgggatcatagcgcatctgaattttcagattgtccgtggtttggctgagatccacgatgtgggtgatgcccgtgtcggtgctgtactgcgtgctgtacaccgaggggataagggtaagggtcgcctggctggggttgttgggatccggcataatggagacactgccggggaggatgccgtagttcttgaactgtgttctgtccgtgctgcactgcacccgaacctgcacctgctccaagccgccgacattctcctccgtgggatgcggcggagtctgcggatgctggccgtcacatttcaccaaaatggtcaaattcgggaaagtgccatccagctcccacttgtcgttgacatacttcagagtaaaagctgcgtgggtgttcccctccagccctgccttttcgtgcgtttttttggtgtccgcatcgtacttgtccttgtaagcggacaaattgatcttgacgatggccttcaaaacaccgttgtccatgtagggcgtcgcgttgctcaagtcaaagccgccggggatcctcccgtatgctttgctgtcgccggttgtttggcacttgacggtgacaaggtttgcgggaatgttgagtcccgcaagatcatcttctgtgattgcgggtgcgggcacccagttaacctgaagggtacatgtcatcatcaatttccccgtcgtttctggagtaccatacgtcgcctgtctttcaccgcagtcatagagataggtcacagtagcggcattctcgtcgactgtcagaatattgccgtcaactctgccacccgcccaattgctggctttgctcacatcaaagccggtaggcagtgtggagagatcaaaggttctcgttgcggtggaaactgtgatgggataagggaggttatcaaattttacttccatggtggagccgctatcccctaagtacatggaggtgagagggttagtatatacccacaaccgctgtagattactattcttgctggtatccaaagtgatcagttggttaccaaagagatgaagaaacttcagttttgtattttcgctgacatctatgttggacacgttgtttccgcagaaatagagctcttccaaattcgtattattggtaagatccaaagaactcaacttactattgaagcagccgaaatattttagctctgtgttcttgctgagatctaaggttgttaattcattgtctccacattcgagcgtttccagcgcagagttattggtaagattcaaatcagccaaagcgttatcgttacagtagagaactttcagttctgtgttttggctgacattcagagtggttaagtctgggatataattacacctgaggtatcccagcttcttattatgagaggtatccaaggaggtcaatttagttctgctgcactcgagatttgtcaatgcagtaaaatactcaatgcctttaaaagatgttatgggtttcccttccacggagatttccttcgcctcggcaatctcatccgcagaaagggtgtcatccttgtttgtatcaaatttatccttgacatactgccggaagccttcatccgggaagtttgtttcgtcaatcaccacatcgtcggcggcaaaggcggcggtgggcagcagcgtcagcaccatgcagcagagcagcaggatgctgagaagtctttttctcatggtcttgttcctccgttttctttgtaatcggttaatatggtcgctgcaattcttctgttccttaactcgtctcctacggtcaccccctttttcctgcggtacacttccacagcaacagaatggcgattctgttgcatcactgtgtccgctgccaacagcgtagaccctaaacggcggaacagagggtaaaaatggcgcataaaatcaggccgggagagaagattttttcatccggccttgttgccgttatcgttttttgacttttttcgctgggtttttcaaatttttcttgctaatgatactgggtctctgttatgatgtagatgtaataagggattgttacaactattccgcaacagaatcgccattatgtgagcagtgttcggctgacgcgctccagcagcttcatgtgctgccgtccggtttccatggtgtagatgcgggtggtgttcacgctggcgtggccgaggatgtccgcaagacgcagcaggtccttttccacgctgtaaaaaacgcgggcgaacagatgccgcagagaatggggaaagaccttgcgcgggtccacccccgcccgctcacacagggctttcatgcgccgccagaccgtgctgcggtccagcggcgttttatttttcgagaggaacacgctgccggtggtgacgccggcctttttcatatagcccagcaggagccttcgcagcgcggcgggaatgaggatcacgcgggttttccccttgttgcggacgacggcgcgaccctcccgcaccgcctcggcggtgatgtgccgcagctcggagactcggatgcccgtgccgcagatggtctgcatgacaatgccgatctgtgccccgcccgcggcgcggacaaggcgggcgtattcctcgcgggagagctcccgttcctcgctcccgaacagcgtccgctggacgcgcaggggcttcacgcggcagtcggcgcggccggaaaaggacaggtagctgttgatccccgccagcatggagttgacgctggcggcctcgtatcgctcggtcagtccttccttgtagcagacggtcagctccttggtgggctcgcgcccgtccagccagcacaggaaggcgcgggcgtcgcgcagatacttttctatcgtggcgggacttttctcgttttcgcgcaggtgcttttcaaaggcttgcagctcgttcatgaaattatcctccgtatcatagctttagagttattgtatgatatgggggtgttctttacacgccacacccgtcttttctccagcttcgctcttcccggaagatatcacgccgtgctggctgttttctttgattatggcatcccacctcatggggtggcctcggcgcggttttcatgttgttcatcgagtggaaaagcgggattctgagaatacgacaaagccccgccggaattactccggcgaggcattgcctttgaccacataaaatgccacagacaggtgtggaacacatgggagatgtggggcacaagatgttaggaaaggaattaaaatcgagagaaaaccactgaaaacggctaaaaagtgtaggaaaaataatgcggtagctctttgtctatggcgtagcaagatttgagctgctacggagacttccgccgactacaacggtataaagcgtaccgattttctatcaaagcgccgccgcaaaccgttgtgacacgtggctttgcggcgacttttctcaaatttagcgtcaaaccgttctgggaacctcgaaaaaagcgtcaatttccaaaccccgcaaacccttgcggcagctcgcactgcgggctgctgtgaataggcattggcgcgaaaagcgccaatgcctttctcctgctttctttttcgccctcgaaaaagccgtgaaaagcgcaggaaacgcagtcataccaacgtttccagcacattgtccacacggacttcaacacctacagcacaaacggcccacgttcgctttcacacctgaaagtggatacacactcggcttacggagaaagattgcacacaacggcttacacgccgaaacaggaggcatttcggatggggcgctatcattaccctcgacacgtactgcacgttcacgaacatccccgggccgggtatcagaacggcgtgctttgccgcttttggggcttggtcgtgggtgctcccaaagaacgcagagagcctgcgggacagcgatgcgcttatgcgcgtcgctgtcccgaggcgtcgcggccccgctgggccgcgtgatctttttacttttgtcgaaattgcggcttgtacgccctgcgttcagtgctttccgcatgtatggggcaggggtggtatcactaccctcagcgcgctttacgtgctgctgaaacgccggacggccgcttgtcaaagtggctaatttgtcattttctgaggttgccgagcagcactccctgcgcggtcactttttctgctaatacgcagatatccctgtcggcaatttcagtagcaaacacttttgcgttatggtacgataagtcccaaattcggacctttcggagatgagggtgagccagaatgacagaaaaggaaaaaatgctgaagcaaatgcttcatgacgcgaatgatctaaagagctatcagatgatctggctcggacaaaggatctttgttatgactacaaccaactttgcccatctgatgaagaaggaacgcaaaactgatgaaaaagttggtggtcgaagtcaaaggagcattgtgatgagatttgtcaagggtaaattacaccagtaatttattgaaatcatttgttttagaaattcaagggatatattttattccccactgcataatggcataaaataccggcaacaaatcttgccctttcagtgttagggagtattctactcgcaacggcatctcattgtactggattcgttgtatcaaatcatcggcttccaactctttgagggcatttgtcagcgccgtatttgtaattggctttagcatctttttcagttccccaaaccgcatgggacacttgatgcatagttcatagagaatttggagtttccatttgccctgcagcatttgaaccaccggcgtgaccgggcagtttccatcatcggttagaatgacactgccaaccttttctttgaattcttcataagtcatgattggatctttcctcgtcttttgcagtatactttttgataccaggtacaaacaatttgcgtacttgaacaaaaattgctgtcaagtataataaatatatcactggttggccatgcagtcaacgactgaaatttctcagaaaggtctgaatgacatgaaagaactgaacattatggaggctactgttctgacctcccccaatccgctgacactgatctgctctaaaaaggaggatggttctacgaacctggctcccatttgctttgtgtcttacctctccttcaatccgcccatggtgggtttcgccactggcaaacagtcccacaccggtaagcaggtacgggagaccggcaaagtcatcgtcactgttcccggtgagagtctggcaggcgcagtaatggcctgcggagcatctaccggtgccgagaccgacaaggtggccgccaacaacatcgagatgatgactgtggagggcagcaacatccagattccggcggacacccggctggcgatggtggctaccttgcagcagtcggtggaggtgggcgaccatatcctgcacatctgtcaggtggacaagttcctgggcgatgaggacaagaagggcctgtatgcctggaacggcttcgggaaagttgcacctgcggtagaaggctaaatcttaaaatggtaaggaggtgtcagcggtggctgtttgtatcaaagactgtattcagaacatgaatctggtgattggctgtactattggttgcagctactgctacgctagaaacaatgttcgtcggtttcacatgatcgacgactttgaaaagccggagttttttcccaataagctgcggctgatggagaaaaagcgcccacagaattttctgctcaccggcatgagtgattttgcccactggaatccggaatggcggaatcagatattttctaaaatggctgaaaacccacagcatcagtatctgtttttgaccaagcgaccggaggatattgtgttttccactaccctggagaatgcttggtttggtgtaactgttacctccagcaaggaaaaggaccgcatccaggctttacgggagcatatccatggcggacactatcatgtgacctttgaacctatgtttgatgatgttggcatggtagatcttaccggcatcgaatggatcgtcatcggtactgagaccggacgcaggaagggtaaaaccgtatccaaaccggagtgggtacggaatttgaccgatcaagctcacacactgggcatccctgtattcatgaaggaagatctacttcctatcatgggagaggcacaaatggtacaggaatttcccccggccttttaccgggtattggaggaacagaagacatggcagaagtgaaagagagcagcattctgattcaggatgtcgaaaccaaaaatattatgacaaaatccaccctgccggtgggcggctattccgtcaatccttatgtaggctgtacccatggttgcaaatactgctacgcttcgttcatgaagcggttcaccggccatactgagccttggggtacttttctggatgtgaaatattggccggcaatcaaaaacccccggaagtacgccggacagcgcgtagtcatcggctcggtgaccgatggctatctgccccaggaggctcagtttcagaacacccgaaagcttcttgagcagcttcggggcagcgaggcggaaattctcatctgtaccaagtcagacttggtgatccgtgatatcgaccttctgaaagaactgggaaaggtcacggtttcctggtcgatcaatacgctggacgaggattttaaaaacgatatggacaatgccgtcagcatcaagcggcggctggatgccatgaagcaggtttatgacgcaggtatccgcaccgtgtgctttatcgctccggtttttcccggtatcacggatttcgaggctatcttccatcaggtcagaaatcagtgcgacctggtgtggctggaaaatctaaacctgcgaggcggattcaaaaaagacatccttgactatatacgtaaaaaacatcctgacttggttccgctgtacgacgctatctacaacaagagggacagaagctacttccgtggtttggaggatcaagcggaacggctggcgaaagaaaacagctgtcccttcgtggacaacgagctaccctacggacgagcagagcctgggcacccggtcattgtggattacttttaccatgaggaagtgcgtggctcggaaaacactgggaagcgaactcaaaaagtatgatcttagggtgctctgaaacgtagtatggacaatcgacacccacactctaagttacgtgtgtcaacgtgataaaaattatattggacaaacgcttgacaacttttgttttgtaatttcaaaattttctctgacccatttttgacccagaacacgaaaaaagctggcagggctggacggaaacaatggaaaactcaccgaacgaatggcggtaaaaagcacaaatcggagccgaaacgactccgattttgctttgagacaacctacggaccagaaggccgggggttcgaatccctcacggcgtgccaaaaagacccgaaaccgtaaggcttcgggtctttttgtttgcataagttgttgttttctcccgctgcttttttctgacccaaacgctgaccccaacgggagtgggcagcggaaaccgtcagacagcacgggagaggatgctccccattgtttgcgccgccttgagctgtgcgtcggtggtgacgtgggcgtaggtgtccagcgtgaagcccgcagagtagtggcccagcattgatgacaccgttttcacgtccacgccgttctggagcgcgcagcagcaggtcgtcgggccgggcggggattccagcccccagtgcctctacatagccccgcagatgtgccggcagatctgttacccccaacaggcgcagcacgcagtgcagcgtttccggtggtagaccgtggagtttgtttcgttatacttcccggcgcagcacacggtagacgaaggacatatccagtccgccgcgcaccacgtctgccagcaggtcatactgccgctccttgtagccgcgggtgtcgaaggtcgccagcgcgtcaaaggacacgccttttctggcgcacagcgtccgcaggatcgtatcggcgatgcccggcgcgtcaaagataccgtggacgtagctgccgtacacgtttccgccgccgctgagggcgggcatctcctgccggctgcgccccatgtggatctcgtacccctcgtaggccaggccgttcagggtggagagcagcccctccacaccgtgaaagacgccctgcgtctgggtctgcaccttctcaccacggaactcggtgtccatgtccagcagccccaagccgctgatctccgtgaccccggcggcctccacctgctcggggtcggacacggtgtgccccagcatctggtagccgccgcagacgccgaagatcagcgtaccggcgtctgccgctttcaggatggccgcctccagaccggactgccgcagccaccgtaggtcggcgatggtgctcttggtacccggcagcaggatcatgtccggccgatgcaggtcgctcacctgatccacatagcgcagcgacacgttctcgtaatgttcaaagggactgaaatccgtgaaattggagatacgcggcacacggatcaccgcgatatccaagagtttccgctccgtggagcggccgaaccgctcggtcaggctgtcttcatcgtcgatgtccacatgggtgtaggggatgacccccgccaccgggatgccgcacagctcctccagcgtcttcagccccggttccagaatggcccggtcgccccggaatttgttgaccaccacgcccttgatgcggcggcgctcgtcctcctccagcagcgccaccgtgccatagagctgggcgaatacgccgccccggtcgatgtcgcctaccagcagcaccggcgcgtccaccagcttggcaagacccatgttcacaatgtcatcctgcttgagattgatctccgcggggctgcccgccccctcgataacgatcacgtcgtactctgaggccagactgttgtaggcctccagcacggcagggatgtagtcccgcttgcggcggaaatactccatggcctgcatattgccccgcacttggccgtttacgatgacctgactgcccacgtcggtggtgggcttgagcaggatgggattcatgcgggtatccggctcgatcccggcggcctctgcctgcaccacctgcgcccggcccatctcaccgccgtccctggtgatgaaggagtttagcgccatattctggctcttgaacggtgccacgcggtagccgtcctgcttcagaacgcggcagagtcccgccgccagcaggctctttccggcgttggacatggttccctgtatcataatattcatagccatagcgatttctccttgcagaattgccggatggccgttatcaacgcttcgttttcctcatggggccgcacggcgatgcgataccacccgtcgtccagcccactgtaattcccgcagctccggatggcgatgccctgccgcagaagcccctcccgcaagccccgcggcccgcggaacagcaggtagttggcttgggacggacacacccagaagcccagcgccgtcaggttatccgtgagccaacgccgctccgtgcggatcagttcccgcgtcctccggagaaagccctgctccgtcagcgccgccacaccggcgctctgcgccagcgaggatacgttccacggctgggatgcactcgccatgcggtgcagcagcgcgctgtcggcgcacaggcagtaccccagccggatgcccgccatgccgtagctcttggtaaaggccttcaggatcagcagctccgggtgcgccgccaaaagggctttggcgctgacaccgtcctccgtaaggtcgaggaagcactcatccagaaacacccgcgcaccccacgccgcacagccttgcaggatccactccagcagcggcagcggcagcagccgtccggtggggttgttggggttgcagaggaataccacctccggttttttctcttccaaaaagggcagaaagccctcatccacatcgaaattctccgcctgatgcagaaaatacggcgtcacgcggcagcccacctgcgccagacccagcccgtactcggcaaaggtaggcgcaggctccacagctgtccggggccgcagggcggcgcagtatgtgtagatcaggtctgccgcgccgtttccgcagagaatataggacgccggcacctgctcatgggttgcgatggcctgcaccagccggcggcagtaggggtcggagtagcggtgcagctggggcagagcccggcacaccgcctccaaaacgccggggggcgtgccaagcgggttggtgttggcggaaaaatccagtgtgataccgccgccgtacacgtcaccgccatgttgattttccatttgatacagcatctacgtctcctttacagcgcaaagggcagcttgaccccgcagctcaaaagcagggtgaggatggctgtgacggtcatcaggcgacacacacgggggatgtcctcgtgggtgatctcccgcgctgcgtcgccgatatactcttttttgtgcagcacgccgtggtaccatgcatcccccgccagacgcacgcccagcagccccgcgcagacggattccgtctgggctgagttgggactggcgtgcttccggcggtcgcggcggaagatccgccagcctgccgccgtatccagccccatcaggccgcccgccgccagcatcagaagtgctgacagccgcgccgggatgtaattcaccacatcgtcggccttggcgggtaccagaccaatgttcttatagggcggctccacataccccagcatggagtccatggtgttcaccgccttgtagaaaaagcccagcggcgcgccgccgatggccagaaacagcagcggcgccaccacgccgtcggaggtgttctccgccaccgtctccacggcggcgcgtgtcacggcggcgtcgtccagccggtcggtgtctcgccccacgatcatggaaacagcatggcgggaggcggccaaatcgccgctctccagcgcgtcatagaccttcatggtctcgtcccgcagggacttgaccgccaagatctgccagcacatcacactctccagcgccaggcgcaaccacgggctgaccagaccgcacagccacagcagcagagccgggacggcggtggatatgatgaccaccgcgccccacagaatggcacccgccgcccgctcgccggacggcgttttggggcatacgcaccgcagcacccgctccaacacgctaatacattttccaatcagaactaccggatggggaaaactgtgggggtcgcccaccagaaggtctatgcaaaagccgataacaagtgccgcaagcgaccacatcatgccgtttctcctccgccctgcatcgtaaaaatataaatgggattctgcccgctcatcagatgatagcctccggcccttctgtcccgcgccgcctgcagcgacaccacctccgtctccgtaaagggaaacgccgtcaggcactccgtcagctcagccacggactccagcgaaacggccgtggccacgatgcggacacgggggtttcttgccagcagcagcgccacgatctcccgcatattcccggcgctgccgccgatgaatgcgtgggtaggcgcgggcaaaccggcgcaggcctccggcgcactgccgcagaccacctgtaggttctccaacgaaaaccgctcccggttctgccccagcagcgccgcggcgtcctcccgccgctccacggcacagacctgtccccgctttgcctgtaaggccatctccaccgacaccgagccggtaccggcgccgatgtcccagcagacgctccgctccgtcagccgcagcttggaaaggcacaccgcccgcacctcgcttttcgtcataggcaccaccggcattccctccgcgctgcggaggaagacgtcatccggcagacccggcgtgaccaccgcgtcggggtggggattttcgatgagcgccacgctcaagggctcgtaggcaccttctgccagctctgctgccgtgccgcacacaatgcgctcatccgggtagcccagccgctgtcccacagacacggtgacgccgcccagaccgcctgctgtcagtgtgcggcacaggtcgttgatgccgcgctcaccgcccaccagcgcaaagagacggctggttgcccgcacctccggcaggatgttgtgctgccgtccatgaaggctcaccacccgcacatcctcgtaggaggtttgcagccgggcgcacagataggacagcgagctcaaacctggcagcaccgctgtgtcgcagccctccagcagaggaagcagctttttggtgccgctgaaaaagccggtgtcgccggacatgaccaccgcaaagcggcggtattcccggtgggcgcggataaagtccgcaatatcctgcggcgcaatggcgtcataggtaggctgtcccggccgcgccacagcatccaacatccgttttgcgccaatgagacagtccgccgtctcgatggcttcactgacctcgcgggtcatagcctcccggctgccggggccgatgccgacgatccgcacctgcggccggacggtgcagccgaaccgcttacacagcacatccagcaccgccgcaaagggaagccccccccgctggggcgggcgaccaatgaccaccagacctgcgcccgccttccgggcggcggacaccttagcaggaaagccgccggcttctccgccgtccttggtcaccatccacgcggcgttggcaaaccgcagtgtggccagatccatctcctcggagaaaggcccctgcatggcgatgatatgagaggcttttaaccccgctgtgcggcaggcctccagtgaggcatccatgggcagcacacgggcgtatacccgctgggtaaaatcgaggataccgctatacgccgccaattccttactgccggtggtcaggaggatgctgccctcggtattcgccagaaacgcggcggcctcggcggcgttttccacgcacacgagcgcctccttcgggtcacaggactgccgcagcaggcgcagatattctgtttccgtctcccggcaggccgtgcagatgctctcggtgatggaggcggcgtaggggtgggtggcatcgatcaccagatcgaaccgggtctcttgcagcatccggatgatgtccgccaccgggatgcgccccgccagaaccgtgacgtttttcgcctctggcagcagcgtctcaccgtactccgttgccacacataccgtggcctgtaccggctgtccggcgagaaattccgccagctcccgcccttcggtggtgccggcaaacacgcagatattacacatttcggtatcctctgggggtgatgagctgtcccgccaccgtctttgccgcactgttgccgataaacacggtgcagaacatatccacctccgcctcccgcagctctgccagcgtcaggatgcggcggctctgcccgtcgcggccgatgttgcggacgatgccgcagagtctgtcctccggcagacggcgcagcaaaatatcgcaggcgcgctttacatgatccggtctgccgtggctggccgggttatacagagcgatggtcagatccgccgccgccgcgcagtccaagcgcttttcgatggtctcccacggtgtcagacggtcgctgaggctgatgaccgcgaaatcatgggtcagcggcgcacctagcaccgccccgccgctgcacgccgccgtcaatcccggcaccacctgaatctcaggctcctgcgcctcgcccctcagctcatagaccagcgccgccatgccgtagatgccgctgtcaccggagcaaaccatggcggcggtcttgccgctgcgcgccagctccagcaccagctggcagcgctctgtctcccgtgtcatgggcgtggagtgaagttccttgccgggatagcgatcccgcaccagatccacatagacggggtaccccacaatggcgtcgcacgcctgcagggcctcgtctgcccggatggtcatatcctcatagccgccagggccgatgcccactacaattaccttacccaaagcgcacctcccaatgctccgccgcgacggcgacggtcactccgtcccgcgctgttttttgtacgatcagcttttcggcatccagcagcgccgcccgttcacagacattgtctacgccggtaacggaacggacgaagtcggagggagtgaaatcacccgccacatcccgcagctgctgcgccgtgtaaaaatgcaccggccagttgtttttctcacaggcggccagcagacccggctcgtcctgcttcagatcgatggaacagacgccgcggatagccgctgtgtccaggccattttccgcgaacactgtctgcaccgcacgcaccaccgcttcggcagagatgccccgccggcagcctacgcctacccgcaacacgcgagggatcagccgcagggtgcgggcaaagggtgttctgacgtgccagccgatgaaaatgcccagagggccggtctccccggcaaacgtaccctccggcagggggacaggcaggtaaaactggctacaaagaggcacgtccccctccagtatcgccgccgataccgccttggcaagccccatgtcggagatggcacagccgtgccgggcggcccatgcgtccacggcgaattttccccggacgtcggtggcggtggtgaccaccgccgtggcgtccagcttctccgccagcttttccgccagcgcgttggcgccgccgatgtggccggagagcagggggatcacaaactgccccgcctcgtcgatgcacaccaccgccgggtcggtttttttgcttttgacatagggggcgatctcccgcacggcgatgccgcaggcccccacaaagatcagtgcgtccatggaggaaaagcacacaccatatatcgccctgtccagcggcagaaagcccggctcttcaaaacgcggcatggtatagcacatccatacctcctccggcagcgcctccagtacccgccgcgccgtggcacagccgccccggctgaaggcaaacagggcggctctcattgggcccccttgcggaactccgttgtaaaatcggggtggtacagcagcgaccggagatagttgtcacccaggcagttgcccaccacgatcaacgatgtcttggtcagaccgttgcccgtcactgtctcgtggagcgtccccacagtgcagcggaagatcttctcctccggccaagtggccttgtagaccaccgccgccggggtgtcagcggtatagcctcccgccagcagctcatcttgcagcagttcggtcagtgaggtgctgagaaacagcaccatggtggcctgatgggccgccagtgagcggatggactcccgctccggcaccggcgtgcggccgggggcgcgggtgatgatgacggtctggctcacatcgggcagggtgtactccgcccgcagagcggccgccgcgccgcagaaggcgctgacgccggggcagacatcgtaggcgataccgcgtttttccagctcgtcaaactgctcccgtactgcgccgtagatgctggaatcccctgtgtgcaggcgcacggtggtcttgccggcggcctccgccttctcgatgagggcgatgacctcttccagcgtcagcttggcgctgtcgtggatctcgcagccctccctggtatagtccagcagcgccggatttaccagtgagccggcgtagatcaccatgtcggcctcgcccagcagcttgacgccccggacggtgatgaggtcggcagcgccgctgcccgctcccacaaaatgtaccattgtcagtcctcctttatccggcgcagcagtgccgctgcgtcctttgtctcacagagatagccatattccttggaaaagaggatggctcccgtctctatatcactgcatttataatgcatcatgtcgtcgatgcgcccggccagccggtgcagcaccgcgtcataaagtccctgctccttcaacagccgcagggcgtcgtcacaggtggcgcagcagagcatctccgccgccgcaccgccgtgcagcccctctgcggcggcacaggccgtcaggatgtccatgcgacagtcgccgtagcgggagtgggtgttccacataccgcccgccagctttaccagcttgccgatatgaccgatgagcagcgcccctcggaagcccagctcccggcacatctccatcgtgtcgccgatgaagttggaggtcatcaccgccgtggcggggtcgatgcccatgacacccttgatatagtctgcgccgtagttaccgggggccagcagtacataatccgcgccgccctcccgccgctgccgcagctctacatggatggtgtccaccagcgcctgctcgctcataggctctacgatccccgtggtgcctaagatggatatgcctccctcaatgcctaatcggggattgaaggtctttttcgccagcgtctcgccatcgggagcggaaatcaccacttgcagcccgccgatgtatccgaacaggccgcagacctcctccacattctcctgaatcatccggcggggtacagagttgatggccgccgcacccaccggctggtcaagacctggcatggttacccgccctacaccctgtccgccgtcaatgacaatgccaacagtctctgttttccgcacctcggcatagatcagggtgtcacgggtgatatccgggtcatcaccgctgtccttccggatggcacagtgcacacagtttggggacagatggatgtcctccaccgccagcgtcagttccatgcccttgggtgtcagcaggcggatggactcctttttactgccgctcagcagcatccatgcggcggccttggctgccgccgcggcacaggaaccggtggtgtagcccagacggagtttttttccgtcccgtatgataaattccttcataacctaccgcctgatctggtagagcatggcgttgcagatggccgccgccacgttgctgccgcccttgcggccccgagccacgatgtagggcgcggcagcggccttgatgatgcgctccttgctctccaccacgttcacaaagcccaccggcaccccgatgatgagggcgggatggagcttgcccgtctccatcagcgcctctaaggagaaaagcgccgtgggggcgttgccgatagcaaagatgcagggcttgggtagggctgccgcccgctccatggatacaaaggcacgggtcacaccgcgctccttagcctccgccgccacgtccgcgtccgacatgaagcagtgtacctctccgcccagcgaggcgaggatcgtcttattgatcccggccttggccatctgggtatcggtgacgatgtcacagcccgcccgcagggcggcaatggccttttgtaccgcgtggtcggaaaaggccagattgtccacatagtcaaaatccgccgtggtgtggatgacccgtttgatgaccagctcattctccggatccagccgccggtcacccagcagctcggtgatgatggcgaagctgcgcttctcgatatccataggcttcatctgttccgtcatagcgtctcctttctgcaagccgccaaaaagcgctgtgccatgacgggcttggcgtaaaaatggaagtgagggaaacccgcgtacagcgtatccgtggcatacgcacagcgccactgcttgccggagggcttttccgccagaaaagccctgcccggtaggggcgtgtcccaatggtgaaattcatgcatcggcacctgctctccggcgcggcagagaaggctgtcctcctgcgccgtggcggtgatgtagccgaaccgggtcagcttccccgtgtcaaagcagtcaccgggcagcgcgcctaccatggcgtggcctgcgatggactctgtcaggtacataaagccgccgcactcggcgatacagggcatccccgcgtgtacggcctcccgaattcgcctgcgcaggacatagttttccgccaactgcgccgcgtacagctccgggtagccgccgcccaagtacaggccctgtacgccatcgggaagccgctcatccgccagcgggctgaagggtaccagctccgcacccagctgccgcagcaggtcgaggctgtcctcatagtaaaagcagaacgcccggtccctggccacgccgatacgcaccggcgttcccggctccggcagggccggcgggataaagcgcaggggcggcgcagcgtcagccaactccagcagtgttggaatgtccagcgttttttccgcctcggtcgccagcttgcgcagcttctcttgcagatcggccacctcgtccgctgtgatgagccccaagtggcggctctccagcgcgcactccggcagacggggcagatagccgcaggcgcggacgcccagacggttttccagctcccgtgccagtggaccataactcatggcgctgcacccgttgaggatgacgccacggatgccgctgtccggcgcaaagtggagaaagccctccaccgccgccaggacggaaagggccgcccctcgggcattgaccaccagcaccacggggctttgggtctcccgcgccacctcgtaggtgctggcccgaatggaggtgaggcccagcccgtcataatagcccatgaccccctctatcaccgtgacatcgcagccccgggcgttgcgggccagaagatagcgcagggtatcgggatcaaagaagaaggcatccaaattggagctcttcgcgccaatgatccggctgtggaacatggggtcgatataatcagggccgcatttcgccgcgcctacccgcaggccccgcgataccagcgcctgcaagacggcacaggtaacggtggtcttgccgcagccgctgttggtgccggccagcaccagccgggggactttttgctccatagcgccctctcaatccgccacgatggtggcaaaataactgatctcctccggcagctgccgcaggtcggtgtagacctgctccgtttccagtccgcagtccgccaccatcccggcatttgccagcagaccgtggcgctccagcgccgctgccgctttgtagatggccttgccggatttcatcacgacctttgttcccggcagcggcagcgcgttgtccagatccgtgctgcccggcagaatgtggagcggctcctccatgcgggtcaaactccgtcccagccgcgccgccacggcgcagaagctggtgacgccgggacacatcaccgtctcaaacccatcagcgcggatgcgctccagaatatagtaggcagtggcgtacacggatacgtcgcccagattgaccatggccacgtcccgtcctgccgacagctccgcttcgatagcggctgccgcagtgcggtagctgtcctcccgcactgcctcgcttcgctccatgctgaagtccagcggcaagatggtcttgccctgcgtatccaccgccccggcggcgatatccagcgccagcatccgcccggacttcatccggggggctgccaccacaggacagtccgccaagacccggcaggcctgccgggtcagcagctccgggtcgccggggcctacgctgacggcgtaaaaaacaccctgtttttccatgatagcactccttacggcacaaattccaggctatcgaagcaggggtcatacttcccgtgctccatccggtacagctttgcaatatatgcgcgggtgaagatctcctccggcgggccgatgcggtcgatgcggtcgcccgccacacacaccaccgtgtccgaaatgcgctccgccagctccagctcgtggagggacagcagcaccgccagatcgttctcccgcaccatgcgcttgagcaccgtcaacaactccagcttatagcggatgtccaaaaagctggtaggctcgtccaatacgatgatctccggctcctgacacagcgcccgggccagcagaatgcgctggcgctgtccgtcgctgatggcggagaaggggcggtcggcaaactccatgccgcctacctgcgccagagagcgctccacgatagcctgatcctccggctgcaggatgcccagccgccccgtatagggatagcggccgctgctcaccacgtccctgcaggtcatcagctccggatccatgcgggctgtcatcaaaatggccatgcgccgggcgatctcattgcggctgcgcgcctccatggcttttccatccagaaacaccgtgccggacaccttggagagctggccgatgatggttttcaatatggtggattttccagagccgttggggccgatgagcgtcacgatcttgccccgctgcacatgaagggctatgtcctcgatcagtggcttgccgtggtagcccacggacaggtcttttgtttccagatatgccatactcacgccgcctttctgtggatcatcatgtagatcacgatgggtgcgccgaataccgccgtgacggagctgatgctcacctctgtgggggcaaaggcggtgcgggcgatgaggtcgcaaaacaggcagaacacgccgccgcccaggaagcaggctgggatcatgacgagcggctccgccgatttgaacagggacttcatcaggtgcggcactgcgatgccgacaaaggagatggggccggcaaaggccgtgacgcaggcggacagcacactggacaacaggatcagcgccgtccggaaggcccgcagggggacgcccatattctgggcgtagacctcgcccaactggtacgcccggatgggcttggaaagcaggaaggtcagcagcagtgtgacgccgcatacaccggccatagtctttacgttgccccagctcatgccggagaaggagccgagagaccagttgtgcaggttcacgatgctggaatcgtcggcgaaggtcacgagaaaatccgtcagcgccgagcagatgtagccgatcatcacgccgcagaccaccaacaggctcatgcgcttgacccgctgagagatcagcagcacgaagcccatggacaccatggcacccacgaacgccgccgcgatgaggatggcggaggaggtggtcttaccccggctcagcagcgccagcatggccacgcacaccgtcatctttgcgccggaggaaatgcccagcacgaagggtcccgcgatggggttgtggaagaaggtttgcagcagatagccggacagggacagcgccccgcccaggatcagcgccgacagaagccggggcagacggatctttacgatgatctggctctgggtaaagccaacatcgccccccagcaggatgcgccatatctcagacgcggaaagagaaacgcttcccgcgaagatgttccaaatcagaaatgtgaataaaagcaggaggagcagccaaaagcctccccagatgcgaagtgttcgggtcctcttcatgccgctcctccttataatgcaatgatgtaaaacatgctcacttcatccgtgtcaggaagtgaaacgccgtgtccggcgcatcgttcaacgcatggttgacgtccagaataaggtcgctcagctccagcgactcctgatagaagtttttggtcaggcaccacacgttaccgctcttgacggccttgaagtcggccatcagtggatccagtgccaccaattcgtccagcgtgtgcagctcgccgtcgatgatgctgttgtagatcagcacatcggcgtccactgcaccatggtagaaggattccatctgaatattgatggtggactgagcgttgtcctccgccgattcgtcgaaggagacatagtcgccgccggcgatggcgacgcacttcgccacatagtccgtggatttgcggacgtttacagcgccgctgctggtgatgtagaaaaatgccacggtcttgccggtgggctgctgctccagtacgtccgccacgctgtccatcttctcattaaatagcgcctcggcctcgtcctccttatccagcagcgctgcgtacagcttgatccactccatccggcccatgggcagggtctcatagctggaggtctccaccagcacagggatacccagccgctccagctgctccagcaccgccggggagtggtagatcatggtgttttccaccgccagatcgcagccctgcgacaggatcagctcataatcgggttcggaatatttgccggcgtaggtcattgccccgctgtccatggcgtccttggcgcgctggatataccagtccgcctgctttttaccgctgagggtgatgcagtcgatggcgttcagcttgtcgaagtagtccatggcagcggcagctaccagataaatctggtccagcggctgctgcaaaacggtgacaccggtaggtaccccgtcaggcacagctgcaccctccgccaccagcaggtatacccggtcgttgttgatggtgatgcgcttgtagctgtccccggcgtactccacggagaactgctccgcgtagcgcaggggcatggtacggtcgaagaccagctcgtcccacgacacggcggcggtttgtccgtctgttttgccgggggcgtcagccgcgccgcaggcgcagagggacaagaccatcagcgccgccagcaacccggcgagaaaacgcctcactgggccgcctccaccgccgtggcggacttaaaggtcagggtgtactcgatctcgtggggggtgctcatggcggtggtgtcgccgatgaccgtcagcggggtatccagcgcccgcacgggaatctcaaaggtggagccgccctcggtggtgaggacatcatagcgctggccgtccaccagcatatagtcatacttctcactgctccacacgatagtggcggtggcagcgccgttctccaccttcagggtgcagggagtcagcacatgggacttaccggagccgccctcaaagcctacctcaatggtgtaggtaccgtccgccaatgcgatggcggcagcgtcatcgccgttctcctccttcagaacagggttggagacggacaccttgtggtcataccatacgcccttcttgccgatgatggccacgtcgaactcctcgtccagcgcgggaacggggatatcaaagccattgactgtctcggtcaggccatcgggataggtgacggtgtccttggtgggctggagcagcacggcgccgtccttctgggcgtcctccttcagaccagggaacagattgacgatgctggtggaggccaggctgacgtggatggtcatctggccgtccttcacggtcagcacgcccttgccgtcacaggtctcgttggtgtggaacatactgctgtcggtgttgaagtcggcggtgtatacgccatccgccagagcgggctggtcaggctcatcgttgccgggggcatcggtttgctgctgtccgcagcctaccagcagcgccgccatcatcacagcggccagcagaaacgaaagaattttcttcatggtcaaggtcctccttactttgaaaaaggctccgaggcgataatataccgccccggagcccgttcagtccttgttacgcgatagcgtcgatggcagccttggtgtgtgccacgtagagagcctgcacgtccgcgatacggcccagaccggagatctggcagttcacggtgaaaccggcggcctcaaacatggtcttccaggaatcctcgtccgcaccggccatgtcgttgttggcatggtcgcccgccacgaccatcaggggacgcagcaccacggtggtgtaaccggcttccttgacggccgcgatcacggcctcgcaggaggtatcctcgggctcgccctccacggtgccgatgaacacgttctcatagcccagcttgtccatctgggcggccatctggctgtaagtgaccttcgccacatgagccgtaccgtgacccatcagcacgtaagccacaccggcctccttggcggcggcggtggactcgtagccgctctcgctcagagcagcggcgacaacggccttggcaacggcttccttgtcggcgttgatgacggtggcgtcgctgcccacctcacccagcatgggctcggcaatctcaacggactcgaacttgtcgcggaccttgtcgatggcggcgcacatctcgtcgtactcagcaccgtgcatcagatgggtgggctgtaccaccagctgcttcacgccgttggcgacagcgcgctccagagcctgctccatgttgtcgatcttctcgccgtcacgggcctggatgtggttgatgatgatctgagcggtgaaggcgcggcgcacggaccaatcggggttggcctcctgcagggcatcctcaatgctcttgatgtcggctacgcggctgtcgttgaaggaggtaccgaaggataccaccagcagctccttctcgccgatctcgtcctggttgcggggatcgtccttggaggcgtcgccggtgtccagaccgaagtaatcggggctggcctcctcgccctccaccagcgccttctgggcgtcggtcagcgcgtcccaagcggccttggcggcctcgcactgggcgtcggtctcctcggtgcgctcctgcacgtagatggcgtcgatgagggcggcgaccttgtcggcggcggccttgtcggtctcctcggtgtttacgtcgttgttgtccttgttgtcggcattgtccttgttgccgcaggcggtcagcatgctcatcagcatcacagccgccatcagaaaggcaagtgctttcttcatggttgatctacctctttccaaatatttgttctgaaagaaatataaaagcggctgtgtctcatacagccgccctcggtgcttcttactacatatacacccgtgcggcgctccgcgacggatcataagttcgtaggaaaaccaacctgttggcagcaggcttgagattccacacagaggcaggtctcctgacttcgttcatcacggcgttgcccttcccggtttcccagtggtttgcaagaccgctcccgtacacagtgactgcatcgctccggattcgcaccggattcccttttcatctgctttttggcagacacctctgtgctacaactttatatttttccagacagtgggattatatcacattttgtcgaattgtcaatccattctgatggcgggctacctaaaaggcagccccgataattgagttacacaccaagagattggtcgtgtagctcaatttttttatgccggtaaggaggtgaacgcattggcagactacgctttccgctcttatgaggagcggcagaaaatccaggagatggttgaggcaggcctgagcgccaaagacattgccgcctctcttggcatctctccctccgcagtctatgcggagctgaggcgtggccgggacggcacaaggctccctgacaagcgcctgggctacaacgccgaacttgcccagctcagtgtccagcagggccttgagcggagaggccgccgaactgccggggcatgacatcccgcacctattaaaaccaaggaggacaaaaccgtgagcaacaaccccattgtgctgaaaagcaaccggctttctgatgagtgcatcggaactgtccggttgaccccggaggcggagaaagtggtccgccgtctgagggcaaagaccgctctgcccatccggcagattgtatctgaaattatcgtccaggccgaaaacctcatcgacattgaggggccggaggacactgaggaggattgaccaatgaaaaccgctatttctaatgtggcccccggccaggtggtcaagtttcatggggagccctgcattgtgctggagcaccgcacggctggcaccctgctggtgaccgccgcccagatcaagagctcttttggctccaccaacaactttgctgccagctctttccgtgagcacctcaacggtgcctttgcggatgccctgactgagggccacgctgatgagctcatcacccgtgaggttgacctcaccgccctcaacggctccaaggagtacgggagctgtgagtgcaaggtggccccgctgacctttgatgaaatccgccgtttccacggtctgctgcccaagcctgagagctgggagtggagcgccacgccctggagcaccccctgcgtggatgaggatgatacctgggtcatggacttgagcaccaatggcaatgtcggcagcgactactgcgccgacacctacgggtcccgccccgctttcctcatcccctcccagtataccgtggaggttgatggcggcctggaccagtacaccaccaatgagctgattgcggaaatcaaccgccgcatgaacggttaaggtgagcgccatgaccaccagtgagcccaatgcccgccggtattcccggcggtgccgccagcgccgcatggcccggaggcgcaacgccatggtcatcatggccattctggccgtccttgccactgtgtttgcccttggctatgccagcggatgcagtgcccaccagacggacgatgaggtcaagacccctgagcctgtggtgacagcggaaaccgtcacccctccagccccggaacagagccccgtggagccctctgcaccaccagaggaaaccacggagcctgcccgccaccgtgatgacatcgtgagtgaggggcggctcctcagctacgaactccaggaagtcatgcaggactgctgtgagcactatgaggtgccctatgctctggcccttgccatcgcagaggttgaaacccactttgaccccgatgccgtcagcgccactggtgactatggcctcatgcagatcaactctgtcaatcacgagtggcttttggaaaaaggccttgaccccatgacccatgccggaaacattgaggccggtatctatatcatctcccagtatctccagagctacggagagccagagcttgcgctgatggcctacaactgcgggcccggcggcgcaagaaagctgtgggatgcaggtacataccagaccgactactcccgcaaggttatgaccgcttttgaatactggacaagcgtgctggaggttgactgaaatgccctactataagacctgccctgactgcggagcccaccttgaccccggtgagcgctgcgactgtaaagatgataccaaggaggattgtaccaatgttggaaatgaaaatcaagattgaggcggatgctgccgtcctcaaggccattgacaagctgaccacggcgctggaaaagaacgccgtcaacatctccgtgccccaggacgctcccgcccccgtggctcctgtggccacccctgtcacccatgccccggtgccgccggtcaccatgccgcccgctactgtggtccctacccagcccacccctgcacctgtggcaacccctacccctgcaccggctcctgcggcacctgcccagactgtggcccctactaaccccgctcccactgttcccgtgaccacggcccccacctacacccttgaccagatcgccaaggccggtgccagcctggtggatgcgggcaagatggagcaactgctggctctgctggccaagtatggcgtgcaggccgtcacccagctccagccggaccagtacggtgtctttgccaccgaactgcggacgctgggcgcacagctctaaggaggtgccctatgcctcccgaaaagcacgccctgctttctgcctcatcggcatcccgctggctgaaatgcacggcggccccccgctttgaggagcacctgccggagcgcaccagcgaatatgcggaggagggccgcctggcccattccatctgtgagctcaagaccctcaagaaattcactgtgatgacctcccgcacctacaccacccgcctcaacaagctcaaaaaggacccgctctactctgaggaaatggacaagaccagtgacctctacattgagcacctgattgagcaggccatgctctatgacagcacgcccactgtggtagcggaggtgcaagtggactttggggagtatgtcccggagggctttggcacctgtgacaatgtgatgattggcggggacaccctcagcatcacggactacaagcacggcaagggtgtcccggtgtccgccgtgggcaacccgcagatgcggctctacgctctgggcgctctcaagcgctatgcccccgtgttcggcgatgccatcaagaaagtccgcatgtccattgaccagccccgccttgacagctacaccaccgacactatcaccgtggaggagctgatgacctggggcgagagcatcaagcccattgcacaaaaggctttctccgggctgggtgagtttgtccccggtgaccactgccgtttttgccgtggcaaggctcagtgccgtgcccgtgccaacaccaatacggcgctggaggacttcaaggactgcgtgcccgccgcctccgtcccgcctgacgctatggccccccaggagttttcccacatcggcccgcatgggaatgaggtgcacccgatcctctctgatgcggagattggtgacctcctcatccgtggcaaggagctggtggcctggtacaaggacctggaggaatacgccaccaaggccctactggatggcaagcccattgagggctggaaactggtggctggccggagcatccgcacctttacgaaccaggatgccgccatccaagctgccattgccgccggatatgatgaggccctgctctatgaccgcaagcccaagacgctctctgagatggagaaactgatgggcaaggcggagtttgctgagaaaatcggcggctatgtgaccaagcccctgggtaagcccacgctggccctcagcacagacaagcgtgaggcctacaaccccgccgctgctgactttgccggggtggctgccaatgagtaagtaccagacctgcgcccattccgccccatggcagccacccatcccgctggatgatgaggaaaagggctaccccgtgggccgtttctgcaagcacgcctgccgcagtatggcggtcatccgtgacccggcagtctgcgagagctgcacgcagtacacagaccccaccaagctcatcaccatcaacactggggactaccatgcagacatctattttgaccggctggaggacatgcccctctccaacatccgcaaggttttcaagctactcctggcggacccgtggagcaatgagggagccatccgtcagatgaccctctacctggatgccgccgtgattgaaagcaaagaggcctggaaacaggccagtattgagtatcagaacggctggcgcaatgtgttcaataagaaaagccgcctaaaagaggaccgccaaaagctccgggaaaacaaccggctgaccgctgccgtaaagcggagcaaagcccggcatgagcgctgggtgaaacttcaaacctgctgggctgaggcccagcctgatgcaaacaccagagtgtaatttaactgtaaaggagatcaaaagattatgtatcagaatgatgccatgaaagtcctgactggtgaggtccgcctctcctatgccaacctgaccacccccagagccgcccagcagggcggtgagcccaagtattccgtcaccctgctcattcccaagagcgatgccgccaccaaggctgacattgacgctgccatccaggccgccgccagtgatgccctggccaaggtgtggaacggtgcccgcccgcccatgctcaaggtgcccatctacgatggtgacggcgtgcggccctctggtgtgccctttggtgatgagtgcaagggccattgggtgatgaccgcctccaccaagaacaagccccaggtggtgggcatcgacaacatcaactgcgaactgtccccggcggacatttacagcggcatgtatggccgtgtcaccgtccgtttcttcggttactccaacagcggcaacaagggcattggctgtggtctgggcaatgttctcaagacccgtgacggggagcccctgagcggccaggcctccgctgcctccgacttcgccgggctgggcggcactcctgcggccactcccacctacggtgcggcgatgcccgccacccccggtgcctacggtgtccagcctgcggcccccgccgcccctgctgctcaggtgccctgggctaccaccggcggcatcaaccccatcaccggccagcccatgtaattggaggacatcatgcaccatctcagcattgaccttgaaacctattcaagcgtgccgattgctaaggccggggcgcaaaagtacatctccagcccggactttgaaatcctgctctttgcgtacagtgtggatggtgcgcctgttgaaatcattgacctggcacggggggaacgcctccccccgtggctggtccaggtcatcacctccccggagtacatcaagcacgcatacaacgccccctttgagtggggctgcctgtccaagtttttgggcaccctgccgccggaccaatggcgctgcaccatgttccacggcctctattgtggctacacagcaggcctggatgccactggcaaggccctggggcttgctgaggacaagcgcaagctcaacaccggcaaggcgctcatccgttatttttgcgtcccttgcgcccctacaaaggccaatggaggccgcacccgcaacctgccccagcacgacaccgacaagtgggagctgttcaaagaatactgccgccaggatgttgtgactgagatggagattgagcggcggctctctgctttccccgtgccggacttcgtgcaaaagcaatgggaaacggacctcatcatcaatgcccgtggcgtggccgtggacatggacctggtgagcggtgccctctatctgggcaatgtgacccgccaaaacctcacccaggaggccatgaaaatctccaagctggacaacccaaacagcgtggcacagctcacgcaatggctccaggaggccatgggagaggagcttgcggacctccgcaaggacaccgtggcccgcctgctgggcaaggaggacaacagcccccaggtccagcggatgcttgagatacgccaagagctgggcaagaccagcaccaaaaagtatgacgctattgaggccgctgtgtgcccagatggccgtgtccgtggactgctccaattctatggagcgaacaggacggggcgctgggcaggccgcctggtgcaggtccagaacttgccccgcacttatacagagccgctgccgttggcccgtgagctggtggaacaccgcaagctggatgccctccggctgatctatggctccgtgcctgacactctcagccagctcatccgcaccgcctttgtggccccggaggggcatgtcctcattgacgctgacttttcggccattgaggcccgtgtcatctcctggctggccggtgagcaatggcggctggaggtgttccgcacccacggaaaaatctatgaggcctctgcctctcagatgttcggcgtgcccattgagctcatcaaaaagggcaatccagagtatgcactccggcaaaagggcaaggtggcagagctggccctgggctaccagggcagcaccggcgcactcatcaacatgggagccttggacatgggcatcccggaggaggacctgccggacatcgtgagccgctggcgtgaggccaacaagcgcatccgtgacctgtggtattccatggacaatgccgccgtgcaggtcatcacccagggcggcagtgtgggcatcaatggcctgttgctggcccgtgagtatgactacaaccagggcaccgactgtttcaccatccagctcccctctggccgcaagctctactatgtgagccccggcattggtgaaaaccaatggggcaacccctctatctcctacatgggcatggaccagaaaaccaaacgctggaaacgcatcgaaacctacggcggcaagttggtggaaaactgcgtccaggccattgcccgtgactgtctggcggacaccattgaacgcctggaggccgctggcctgccggtgattttccacatccatgatgaggtggtcattgacattgccccctgggctgatgaagacaccatgctggacacggtggtcaacatcatgcgccagcccatcccgtgggccactgatctgccgctcaacgctgatggctgggtgggcacattcttcaagaaagactaaataactgacgagcccccccccccgctaccaatgcggtggtgggctgaggagggcttttatgcaaatccttgttgcctgcgaggaaagccaggcggtcaccatagctttgagaaagctgggccatgaggcatacagttgtgacctcatcccatgctccggcggccaccctgagtggcacatccagcaagatgtgctccctctgctcaacggctactgctttttcaagacctgtgacggctccgcacattatgtgctggggcggtgggacatgctcattgctttcccaccctgcacctatctttccaatgccggggcctgccgcctatatcctcaaaaggggcagcttgacctggagcgctaccaaaaagggctggagggcaaggccttttttatgaggtttctgaccgcagagtgtcccagaattgccgttgaaaatccagtgtcaagcaaggttttccaaatgccgccccattcccaagaaatccagccctggcagtttggccaccccgtcactaaaaagacccgcttgtggttgatcggactgccccttttggtgcccacagacattgtggagccgcaaggcccctatgttcctgctggcacgggacggaaagacaagagcaagtatggggccgccaagcgtggccaagatgctatcaacagggccaagactttccccggcgtggccgccgcaatggcggaacaatgggccaggcccgtgaccacttaataatcagccccccccgctgtttgcggaggaagggcatgggaggcacacatgaaatacattgcatcgtgctcctttggcaaggacagcctggccatggtgctcatgctcatagagcgtgacctgccgctggatgaggtggtcttttatgacaccgggatggagtttcaagccatctatgacctgcgggatgctatgctcccgatattccagcggcacggcatcaaatacacaacgctatacccagacaacccttttctctatgacatgctggagcgccccgtcaagggccgtgagcggcgtggatatggctggtgcggcggtctatgtcgctggggcaccacctgcaagctgcggaccattgaccagtatgcggagcaccagggcgcaaaggtctatgtgggcatcgccgcagatgaaacgccaaggctccagaaagaacgcaagccctataagctctttccgcttgcggagtttggcatgactgaggcggactgcctgcaatattgctactctgccggatatttctggctggagggctccatccggctctatgacatcttggaccgtgtttcctgctggtgttgctgcaacaaaaacctcaaggagctcagaaacatccgccggtatctcccggagtattgggaaaagctgaaacacctacaagcccagttggagcgccccatgaaaggcttttacaaaggccagccccgtggcgtatttgaactggatgaacgctttgcaagagaggaccgtgacacatgaaaatcattaacccctataccgaaatcctcaccccgctggatggccaggccatcctccagcacattgagctgtgcgggcgggtctgctacaagtctgaggacaaaatcaccgacaccagcgccgccaagtttgtggcgggcatcatcaagcgtggccatgaggccgtcctggaacactttgacatcaccgtcaagtttgtgtgtgaccggggcgtgtcccatgaaattgtccggcatcgcatggcctcctactgccaggagagcacccgctactgcaactattccaaggagggctttggcggtgaaatcaccgtcatccgccccttttacctggtggagggcactgagggctggcagtattggaaagaggcttgctggaccgcagagcgccgctacttcgagctgcttaattggggctgcaccccgcaagaggcccgtgctgtcctgcccaccagcctcaagactgaggtggtgatgacggccaatctgcgggaatggcggcatttcttcaagctgcggaccgccccggcggcgcacccgcagatgcgtgaggtggccatcccgctgctccaccagatgcgctcccaggtgccggtcatcttcgatgatattgaggaggccgcccatgaaactgtgtgaccgctgcccccaggctggctcttgcctgttgaactatctgggcaaggcttgccacaagctccgtatgcaggagtgcccagaggtggtccccaccacgctggagctcatgcacaacatggacgctgaggaactggccgctttcctctccaagaccttttgccagtcccttggaaaaacgcaacttttggaatggctcaataaggaggtgcccaatgaaacgctctgagattttggaggccgcccgccgctgtgtctgcggtgagcgtgagcaggactatggcacgccggagaataactttgaaaccatcggcctgctctggggtgtctacctcagagcggcgcacccggagtatgccaaggtcatgcccatcaacggcatcacggccaaggatgccggcactatgctggccctgctcaaggtggcccgcatcgccaccggctccagccctgacagctttattgatctggcgggctatgcggcctgcgccggtgaaatcgtgacagaaaggagctgcccctatgaaaaagcggaaacccagacccaggagtgaaaagccccgaatgtgtgaccctggcatgtgtgactgctgccagtacattggtgagggtgacttcatctgtgacaaaggccccggccagccggtccttgtggttgaggactggcagcccaatgagaacgccgggcgctgccggagggacacaaagcgatgaacagaaaagagcggcgaaacctgcaacgccaaggtgtgcaggtgcccaaagaccccacactcaacatcaagctctccgctctgggcaagtccataatgaccccggagatgcagatggccatgatgcacgaaatcaaccagcagtgccttgagaaagatgacttgctggctctggatgtggactgcatggtgctctggacactgcaccggcacctgggctttggggtcaagcggctccatgacttctatctggcgatggccgcagaacaccgccggatgcgtgacttttatgaaatggatgacctgtacccggaacggctcaagctcaaggagctgggtgcagatgtcgaacaatggcaaaaggaggtgctggccaatgagcccaaaaccctgggaaaacgctgagggctacgcagacccaacggcatacaacgccatcaagaaagtgtccgcagaggggcatgaggcgctggatgccaaggtcaacactctcatcaaggtcctcaagtttatcattgcggaaagcggctttgagctggcggcccgcattgagctccgggaccgcaagacagggaggttttttagatgaccaaatgcgaaacggcaatctgccagcttgcggtgaatgtctatggcaagaccagccagtgcacggtctgcatggaggagatggcagagctcaccaaggagctctccaaaaacctccgtggccaggacaacgccgcccacatcgctgaggagatcgctgatgttgaaatcatgctggaacagctcaagctcatgtttagcatccgtgatgaggtgacccagcagcgcaccgtcaagctccagcggcttgacaaccgcatttctcaatccctgatacatccgaaaccgtgaggtgtgacccatgcaatttgaccgcaaaataaccatctccgccggtagcagccgaagggccatggtctggcaggcgcaaaccctgctcatttctgagctgtgggcaaagctccagacccccgccagaggcactgagcccctggcagaatatctgaatatgaaaaaggcccagcaggatgacctcaaggatgtgggcggctttatggcaggcacactgtcaggcccccgccgaaaggccaacaatgtgaccgggcgtgatgtcatcacgctggacctggacaacatcccaccgggcggcacggaggatgtcctgcgccgtgttgaggggctgagctgcggctattgcatctattccacccgtaagcacagcccggcagcgccccgcctgcgtgttctgctgccgctggaccgcacggcctcagcggatgaatatgagcccatcgcccgcaagatggcggagtatataggcctggagctctgtgaccccaccacttttgaggtgtcccgtttgatgtactggccaagctgctgctcagacagccaatacatctatgtgtggaaagacaagcccctgctgtccgtcaagggcctgctgggccagtatgaggactggcgtgactgcaccctctggccccaggtgcccggctcccaaaacctgcccactaagctggcagtcaagcagggtgacccggaggccaaaaacggtgttgtgggcgctttctgccgcacctatgacatctaccgtgccatggatgagctcatccccggcatgtatgagccggtggagagtatgccgggccgctacacctacctgggcggctccacaaccggcggcgctgtcatctatgacagcggcaagtttctctactcccaccacgccactgacccgtgcagcggcaagctggtgaacgcctttgacctggtgcgcctgcatcgctttggtgacaaggacgatgaggcccagccgggcactcccaccaaccgcctgccctcctaccgtgccatgtgcgaattggccacgcaagaccccgatgtgtccgccctgatgagccaggagcgctaccaggaggccgtcaaggactttgagggcgtggaggccaccaacgatgcagagcccgccaactggatggaccggctggagatcaacagccagaccggcctccccaaggctaccattgataatgtctggattattcttgagaatgacccgctgctcaagggcaagtttgccctcaaccagtttgcgggccgtggtgaggtgctggatgcgctcccctggaacgcctccaccaagcgccgcctctgggatgacaatgacaacaatggcctctactggtacatggaaaaggtccaccacatcaccggcaacggaaagattgacggggccctctccctccacaccacacagcacgctttcaacgaggtccaggactacctccagagcctcaagtgggacggcgtgccccgcctggacacccttttcattgactacctgggggcggaggacagcccctataccagagcggtgacccgcaaggctttcaccgccgccgtcacccgtgccatgatgcccggcagcaagtatgacaacatgctcatcctggctgggccccagggcattggcaagagcaccctgctggataagatgagccggggctggtttaatgacagcatccgcacctttgagggcaaggaggcctctgaacttttgcagggggtctggctggtggaggtcggtgagctggacgctttccgcaagacggatgtggcgtgcatcaagcagtttctctccctgcgctctgaccgtttccgtgcggcctatggccgccatgtcaaggagctgccccggtgctgtgtgttcttcggcaccaccaacacctctgactacctgcgggaccgcaccggcaaccggcgtttctggccggtggatgtgggcctggccccggcggccaaaagcgtctggactgatctgcccggagaaattgaccagctctgggctgaggccatggtccgctggcagacgggagagccgcttttcctcaaaggggaaattgaggccgccgctaaggaggcccaggaggcccaccgtgaggtcaacacccgtgagggcatcatactggactttctggagcgcccggtgccggaggactggcagaactggccgcttgaccgccgccggatgttctggggcggcgctgtgcagggagatgtcaagctggtgccccgtgaccgtgtgtgtgctctggaggtctggtgtgaggctttggacggcaagcagcgggatatgaggtacagtgacacggcagaaatcaacagcatcattgaggccagcgccttgtgggaaagggccagaggctccctgcgctttggctactgcggcaagcaacggggctttcaaaaggtgcggctttgacccggaacattgcccggaacatttgagattttcagatgttccaatgttccgggcaggtggaacatgttccgggcaatgttccggcaaatgttccgggcaaaacccttgcgccgcaaggcttttgagctaagtggaacattggaacattcattttctatattagggtaaaagagaggatttagagagaatagagaaaaataaaactctctaaaccgcctgtttgcgctacatacacgcgcgaatgttccactgttccgaaaggaggaaatccatgaaagaaagctatattgagagctaccttgttcgcaaggtgaaagagcacggtggcctctgctataagtttgtgtcacccggaaatcccggcgtgcctgatcgactgataatcacccccaccggcaagaccatctttgttgaactgaaaacggaggtgggcaggctggccaaagtccagaaatggcagcggagcgagatggagaaacggggggcggactgccgggtgctgtttgggatggacgcagtaaaggactttttgagggaggttttccccgcatgaaatatgtgccgcatgactaccaggcctattgcatccagcgtgtagttgaggaccctgccgttgggctgtttctccgtcccggccttggcaaaacagtcatcactctgtcagcggtcaatattctcaagtatttccgctggcaggtgcaaaaggtcctggtagtggctcccaaaaaggtggcagaggccacctggagcaaggaggccgccaagtgggaccacctccagcacctccgcacctctgtggtgctgggcagcgccaccaagcgcatcaaggccctcaacactccggcggacatctatgtcatcaaccgagaaaatgtggagtggctggtggactactacaaacaggcctggccctttgacatggtggtgcttgatgagagcaccagctttaagaacagccagagcaagcgctggaaagccatgaggcgggtgcggcgtttcatcaagcggatggtcctactgaccggcacaccgtcctctaagggcctcattgacctgtgggcacaagtttacctgctggactgcggagagcgcctggggcaatccctgagcgcctaccgtgagcgttattttgaccctgaccagcggagccgcacacagattttttcctacaaggccaaagacggtgcggagagcgctgtgttggatgccatttctgacatctgcatctccatgaaagcggaggactacctggagctgccggacttcatccagcatgaggtgccggtgctgctggatgccaaagcccgccgggcctatgaccagtttgagcgtgacctgctgctggaggtggatgaggatgtcatcaccgccgcctccgccgctgtccttgttggaaagctcctgcaaatgtgcaacggcgctgtgtatagcaatgatggccacattgtgccggtccatgactgcaagctggaggcctatctggagctgctggagcagttgaacggagagcactgcctgactttctacggctatcagcatgaccgggaccgcatcctggaggcgctgaaaaagcaccgcaaggacctccgggtgcgggtctacaaaaccgtggaggatgaggaggcctggaataacggagaggttgatgtgctgctggtgcatccggcctcctgtgcctacggcctcaacctccaggcaggcggccagcatgtggtgtggtacggcctcaactggtcctttgagctgaatgaccagggcaactgccgcctataccggcagggctccccctatgacaaggttttcgtccactatcttgtggtgcagggctgccaggatgaggatgtcatggctacggtgcgagatcgccaggacacccatgaggccgtcatgtccgcactcaaggccagaattaagcgagtaaaggagagcgcaaaatgagcaaccctactgtgattttgaatggtgaccaggtttattgtgatgagctcatccgggaaaatgcccggttgaccatccagcatgaggctgaccggctgacgctggagcagatgaggaaacagtgcgtttcctctgaggagtgcaccgccaaggtggcggaggcctatgcccgtgccgataaggccaagcgggacgctgaggcgcttaattccaagctgcgccaagccgttgcggacctgcattttgtcatggctggcggcgatgcctgcaaggtgtgcgccgtcaagtgtgcttttggtgagggcaactgcaaacccgtgtggcgtggagaggatggtgctgatttgtgactttgaaagaactgtcccagctttactacctcaaccgggagatcgagatggacaaaaagcgcctccttgagctggaggccagggcggtgtcctgttcgtcagatctgtccgggatgcccaggagctctggcgtgggggaccgtgttggccgctatgcggcggagatcgtggacctcaagggcatcattgaggccaaactccagcagtgcatctatgagcgcaaccgtttggagaggtacatcaccaccattgaggacagcctcctccggcaggttttcacatatcgctttgtgaatggactgccgtggcagcaggtggccgcatgtatcggcgggagtaacactgctgacggcgtgcggatgatgtgcaacaggtacatcaaggccacggagccggaaacagatgacggcacagaggtccaactgtaacttgttcgttctgttcggtgtttctgtggtacactatatcctgcgggtagtgcctcaagatgatgcaatacctccttggttgagcagcggcaaggtgacggatgatgaaacccagacccttgccgctgtttcattctaacgattttttagagccgtccgatgagggcggcttttactatgtgatggggtggtgagatggcaaagctgactgaaaagcaaaagcgatttgtgcaggaataccttgtggacctcaatgccacggcggctgccaagcgtgccggatatagcgaaaaaagcgcctcccggatagccgtggaactactcaataaaactcaagtttctgccgaaatccaaaagcagcaggccaagcgtcaaaagcgggtggaaatcacccaggaaaaagtgcttgaggagctggctgcaatcgcctttgccaacggtgctgacttcgccaccgtcaaccaaaatggcattgtccgcatcacccccacctctgagttgccggaggaaaagcgcaaggccattgcctccatcaaggaggggcaatatggcacggaggtcaaggtgcacgataaggtcaaggccctggagctgctggccaagcacctgggcatgttcgacagcaagaaaggtggcagcgaggccccagagaataacatctttgaggtcattgaccaaagcaccagagaggagataggcacggatgaaataccagagattgagcacccggcaaaacctggccatgacctggtggaataggcccggctttgaggtctatgacggcatcatctgtgacggctccatccgctccggcaagacagtggccatgacggtgggctttatcatgtgggccatgacccgctttgacggctgcaattttgccatctgcggcaagaccattgagagcctgcgccgcaatgtgacaagcaatctgcccgtctggctggcgggcgttttctctttcaaggagcaccgcactgaaaacaagatcgtggtgagcgccaacggcaagagtaacagcttttacctgttcggcggcaaggacgaaagcagcgccgcactcatccagggcatcacactggcaggcatcctgctggatgaggtggccctgatgccggagagctttgtcaaccaggccacggcccgctgctctgttgagggggccaagctgtggtttaactgcaacccggagggccccagccattggttttataccaagtgggtgctggaggccagcaggcggaaaatgctgcacctccatttcaccatggatgacaacctcagcctctccgcctcagtcaaggcaaggtatgagagcctttactctggcgttttctatgatcgctttatccggggcctgtgggtggtggcggaggggcttatttacacgatgttcaacaaggactttcatgttgtgcccagtgtccccaggccctatgaaaagtatgtgatgtcctgcgactacggcaccatcaaccccaccagcattggcctctggggcaaggctggtggcaagtggtacaggatgagggagtattactatgacagccgcaaggagggccgccagcgcaccgatgaggagcactacacggagctggagcgcctggctgatggcctgcatgtgtccgccatcattgtggacccatcggcggcctctttcattgaggtcatccgccgccatgaccgctaccgtgtagaaaaggcctccaactccgtgctggacggcatccgcaatgtggccacccggctccagagcggtgacatctttttctgtgactgctgcacggactgcatccgtgagtttgggatgtatcgctgggatgaaaaagcccagatggaccgtcccatcaaagaaaatgaccatagcatggacgatgtgcgctacttcgtgcaccgtgtctatgcgcctgatctgattagctttaagtgaggttttactgtgcgagtttctgtgttgggtgtgcaatatgctgtggaatatcggacaagggcccaagaccctgagcttgaggcagcagattgtgatggctactgtgacaccagcatcaagttatgcgtggcccgtaaatatacggcggcagagcgaaaagagcccggcagcaagaaatgcctggatgactacatgcgtaagtgcatgaggcatgaactggtccacgcttttctttatgagagcggcctgagcatcaatagcctctcaccgtcgggctgggcctctaatgaggaaatgacggactggatggctatacaagggccgaaactttatgatgcttggaaacaggcaaaatgtttgtgaggtgagaaaccaatggtgacactcaatctgagggatgattgcaatggccgtgtggccaccaatttcaaacggggcatgacggacaagcgctttctggagcttgaaatcaccgcatggctcaccagcccggagcgcaaaaagcagcttgagggtgaggcctactatgacggctaccaggatgtgacccaccgggaacgcctggcgctggatgaggacggcaagcccattgtgctcaagaacttgcccaacaaccggctggtcaacaacctctattccaagatggtggaccaaaagaccaactactcctttggccgtccgctgtcctttgacaccgaaaacaaggagtatgccaaggccctgggggctctgttcggggcccgttttctgcgtaccatgcacaatgttggtgagggcgcatggattggtggaaagtcctggctctatccatactacgaaaacggggaactggctttccggcgctttcccgctgatgaggtcctgccattctgggcggacgctgaccacaccatcctggacgctgctgttcatgtctatgtggtgcaggaatacgatgaggccgaacacgccaagaatgtggtcaaggtagaggtcatgcacggcggcggtgtggattgtttcatccgcacggatgacggcgtgctggagccggacagctttgcctactccggcccctatatcatcacccggcaggacgatgaaaccggcaaggtggagggctacaactgggagcgcatcccgttggtgtgctttaagagctcccaccatgaaatcccactcctctccaaggtcaagtgcctccaggatgcctacaacaacatcctgagcaactttgccaaccagatggaggaggacatccacaccaccatcctggtcatcaagaactatgacggtgaggacctgggcacattccgccgcaacctggccacctatggtgccatcaaggtgcggtcctatgagggggctgagggcggcgtggacactttggaaatatccgtcaacgctgaaaactacaagaccctgttgtccctgctcaaggatgccatcattgagaacgccagaggctatgatgccaaggatgaccgcatgagcggtgacccaaaccaaatgaacattcagagcatgtactctgacattgacctggatgccaatggcattgaaatggagtttcaggccagcatggaggagctgctttggtttatcaacaagcacctggccaacaccggcggcaggagctttgagggcgaggatgtcacagtcatctttgaccgggatgtgctcatcaacgaaacggaggccatcaacaactgcaagaactccgtgggcatcctctctgatgaaaccatcgtcaagatgcacccctgggtcactgacccggagcaggagctccagcgcatcaaggatgagaaagaggaggccatgcaggctgacccctaccaggccgcttttctggccaaccgcaaccagccgccggtaaacaatgagggtggtggcgatggcaagacagactaacgccgcctactgggcccagcgcatgaaaaacatggaggatgcgctgctggaccagtcctactcctatgtggaaaaccttgaaaagcagtttgccgccgcccaagctgagatcgagcggcagatggcccgctggtatcagcgctttgccaccaacaatgagattgacctggcagaggccaagcggctgctcaattccaaggagctcaaggagtttcactggaccgtggctgagtacatcgcctatggtgagcaaaatgccattgatggtgcctggatgaaacagcttgagaacgccagcgccagggtacacatctcccggctggaggctctaaagctccagctccagcagcgggcagaggtcctatactccaaccaactggactatgtggatgccgccgcccgcaagatgtatgagggcagctactatcacacggcctttgaactgcaaaaggggctgggcgtgggctggaccatgcaggccatcaatgaggaaactatcaccaaggtgctctcccgcccctggaccacggacaaccagactttccgtgatcggtgctggacaaacaagcagagccttgtgaacagcgtcaacacccagctcacgcaaatggtcatccggggcgaggccccggaccgtgccatttctgccatctccaagcagtttgatgtgtccagggcaaaggctggccgcctggtgatgacggaaagcgcctatttctccagcgccgggcaaaaggactgctacaaggccctggatgtggagcgctacaaaatcgtggcctcctttgacaaggacacatgcagcttgtgtgccgacatggacggcaaggttttcaagatgtcagagtaccaggtggggctcaccgctccaccgtttcatccgtggtgccggtgctgcacttgcccctactttgaggacatggacggcatgggtgaacgctatgcccgtgacgctgtgacgggtgagcgcttcaaggtgcccggcaacatgacctatgaccaatggaaagcccagcaggatgctctccatggtcaaggaactgttgataagatgcagaaaatcagctataatgaaaccgctgacagagcccagtttgaaaagtacaaggagcgcctgggtgcggatgcaccccgctatttcaaggacttccaagccttgaaatatgaccgtgctgccgaatacaaagacctggctgggctctattcctacaagggccgtgtgccggaggcctccaaggctgactacaaagcctataaggccgtaaaagccaccggcgtgattggcaccgttcgtgtgccgccggaaattattgatgcgggcatcctcactttcaatgatgcccacgccgcacgccacggctgcacgctggacgatgccaagggctatgtaagagccgccaagtgcaccgtgcggcgcaagcgctgggatggcgtgagcatcaactgctattctcttgacggtgcggcatatattgatgctgataccatgaaagtcaagacggcattttccgaaaaagactttgacccgacaaccaaggccattgcggaggtattcagatgaacacagttttttgccctgttacgggtgggcaggttgatgggaccacttgcctggaaattgtccttgtggcagaccatgaggcaaagccctctattctgcccaatggcatcacatggagtgaggagcagcgtgagcggtgcctcaagtgcccctaccacgctgatctggagagctccgaggagtagcccctttttgatgttaaaagcatcgtgctgaaaatgcacggtgcttttttcatacccaaataccgctggcccagcggactacaagatgggcactgcaacaccgggactggccggataaaaaggacagcagacatgcaaggaggtaacaatcatgttggaatggctgaaaaccgtattgggggatgcgtacacccccgaaattgacacggcagtttctcaggagatcggcaagggctttgtggcccgcaccgacttcaacacaaagactgccaaggtcacagagctggaaaccgaggtcaagcagctccgtgagggtatcaagacccgtgacactcagctctccgagctgaaaaagtccgccggtgacaatgctgaactgcaaaagcagatcgacacgctcacccagcagaacaaggaccagaaagccgcctatgataaggagctggccacggtcaagctgactgctgcggtggatgcggagctcaccgctgctgggtccaagaacaacatcgccgtccgtgcgatgctggcggacttcctcaaggatgccaaggtggtggatggcaaggtcacctctaaggagaacggcgaaaccgtcaccctgggggccaaggtcgaggcgatgaaaaaggacgctgctactgactttatgtttggagatgcgcccaagtatagcggctggaaacccggcgagaacggggacgggggcaagcccggcagcaccaaaaagctgtctgagatgtcctactccgagctgaccgagtacatggccaaaaaccctgacgcaaagctggagtaaccccaacaacacaatcatttcaagaaaggaagtattgaattatgcctaacgctaagtttgacgcaaaatctttcaaccctgaggctttcaagtacatcatggaccgcatcccccgcacccgcctcaacgaaatccgcaagtccaaggtcctggtgggcaacccggacatccgtgcggtgctgggcacccagaacggcaccggctatgcccgtgtggccgtgcgtggcctgctggacggtgaggccgtgaactatgacggccagactgacatcaccgccacctccaccaagacctttgagcagggtgtggtggtcattggccgtgccaaggcgtgggtggaaaaggacttctcctttgacatcaccggcggcgtggactttatgaacaatgtggcccagcaggtggcggactactggcaggacattgaccaggacaccatcctggcggtcctcaagggcgttttctccatgaccggcggcaagagcggtgagtttgtcaccaagcacacctactctgtcaacggcaacctggaggcctccaccctcaacagcgccactgcccaggcctgcggtgaccacaagaaaaagtttgccatgattttcatgcactctgttccggccaccaacctggaaaacctcaacctgctcaccgccctcaagtacaccgataaggacggcgtgacccgtgacctgaccctctacacctggaacggcaagctggtcattgtggatgacgggatgcctgttgaggctgttgccgccacctacaagctgacctctgacaccgccctggtgcccggcaagacctactacaccaagagcggcaccaagtacaacgctgtggcctcccccagcgtggacaacattgccacctattatgaggtggatgtccctgccggtgaggaatacaccagctatgtcctgggtgagggctccatcaactttgaggacctgggtgctaaggtgccctatgagatgtcccgtgaccccgccaagaacggtggccaggacaccctctacacccgccagcgcaaggtgtttgcccccaagggcatctcctacgaaaagaccagccagaccaccctctcccccacggatgcggagctgtccgatggcgcaaactgggctctggtccactctggtgaggccactgagagccagcgctcctacatcaaccacaaggttatccccatcgcccgcatcaagtccagaggctaaaccatgaccgtgtatgaggccgtggtgtcccggctggccatgctgggctacaccgtcacggacaatgacgaaaccggcctcaatttcctcatagacaagtgtgaaaaggacatcctggcagacatcaatcaaagggtgctgccggatggccttttctatgtccatgtggatatggtggccgggcaattcctctatgataagaaagccgccggtggtctggacgggctggagggctttgacttctccgccccggccaagagcatcacggagggtgatgtggccatcacctttgctggagccagtgatggagccagcagcgctgaggcccgctttgatgccctgcttgcagggctcatgcgcccgcctgagagtacgctggcggcttttcggaggatgagatggtagtggggagccccgcccacaaaaaggccgtgcagagcctctgggtgggcaaggcaaccatcaccgtgctggacggggtgctcaatcccgccaatggccgcacggagccccaggagcgcatcctggcggcaggcatccgctgccgcatttcccacaaatctgtggtgagtacagagcccaacgaggaggccacccaggtggcccaaagcgtggtgctctacattgacccctccgtggacatcccggaggggtctaaaatcacagtgacccagaacggcatgacccgtgactatgaacggagcggcaagagcgcagtgtatagctgccaccaagaggtgccgctggagcttttcaaggagtgggcctgatgaactggggaaactgcgattataagcagctccagcgcctccgtgacagtctggccacgctccagagcatggacatggaccgtttctgcacggaggtgtcaaaggagttggccgcccgcctgctggcgctggtcatcccccgcacacctgtggggcagtacccaaaatccagtggcaaaaagggcggcaccctgcgccggggctggacatccaaaacccaagcggatgctgccagcagaggcggcagcaacgatgcgaaagcctacgctgaggcactgccagtcagaaagtccggcaacgcctacaccattgaggtcatcaaccctgtggaatatgccagctatgttgagtttggccaccgaacacggggcggtgacggctgggtgccgggccagtatttcctcaccctgtccgagcaggaccttgagaggcttgcaccgagcgtgattgagagaaaactggaggccctgctgcgggaggtattcaatggctgaaatcaatttcaacagcatctatgacggcgtgagccttgcgctccatgccgcttttcctgccgcccaggtgcatggcgggaatgtcaagcaagggctcaagcccggagattttaatgtcatcatgcctggtgccggtcacgccaaagaggtgggccagaggtacaagcggacacccatggtggatgtgatttactaccccaaggccggggatgcggagtgttatggcatggcacaccggctgtcctttgtcctggggagcatcacaaccccggagggggacatcatccacgccaccggctgtgagtggacactggcggaggatgtcttgcatgtacttttgagctatgaccacttcgtccgtgtcccgctggagcaggagaacatggaaactctcaaaatcaatgaggagggataagccaatggcaaaaacccagaccacggaggccaatgccgccgcctttaccaaggcgcagttggtggcctctcagagatatgtccaccggcgggacctgatcggcgcactgctggaggatggcaagacctacaccttgaatgaggtggatgcgctgattgaaaagtttatgaaaggcaaggtgagataaatggctcttggcggaggtaactggctgacccagaacaaggtcctgcccggcagctacatcaatttctccagcgtggcaaaggcatccgccactctgtctgacagaggctatgcggcagcgccctttgttctgagctggggcccggagggtgaggttttccccgtcacctctggtgagtttcagaagaacagcaaggccatcttcggctatgggtatgaccaccccaaactgctggccctgcgtgagattttccagcacgccaccaccgtctactgctggcggctgggcaacggcgaaaaggcaagctgcacctatgcggatgccaagtaccccggtgtgcgtggcaatgacctctctattgtcatcgcctccaatgtcgatgacaccagcgcatgggatgtgagcacctacctggacggccagtgtgttgacacccagacggtcaaggcggtcactgatctggtggccaatgactatgtggttttcaagaccagcgccacgctggcggccactgcgggcaccaagctgaccggcggcgctgatgatgcggcagtcaccggcgaggaccaccaggctttcctggataagctggaggcctatgctttcaacaccctgtgctgcccggccacggagagcaccgtggtcaatctgtatgtcaagtacacccagcgcatgagggatgaggtgggtgccaaattccagcttgtggcctggaaacccagcgctgactatgagggcgtgattggcgtgtggaacaccgccacccacgccaccattgccaatgtggacacccaggcggtggtctactggactaccggcgcacatgctggcgtggccgtcaacaagtccctcaccaatgccaagtatgacggtgagctcattctggacaccgaatacacccaggcagcgcttgaggcggctctcaaggcgggcaagtttatgttccacaatgtcaacggggtcacccgtgtgctggaggacatcaacaccctgctgaccctctccgacaccaagggagaggttttccagtccaaccagaccatccgtgtgtgtgaccagatcgccaatgacacggcggtgctgttcaacacccgctatgttggcaccgtgcccaatgatgcctctggccgtgcctccctgtggggcgatgtggtcaagctcatccaggagcttgagaaaatccgtgctgttgagaactttgaccccgacacggtgacctgtgagcagggtgacaagaaaaaggcagtgctgctgaccatcaacggcctcaacatcatcaacgccatggcccagctctacatgagcgttatcattcagtaaaggaggattgtgacacatggctgacaaaatctctatgaacacccaggatgccgtgagcgccaactttgctgagtgctttgtgacgctgaacggcacccgctactccatgctgatggccaaggagtttgagggcaaggcctccgtcaacaccaaggaagtctaccgtctgggcaatcccgtgatcggccacaaggcccaaaccattgccctggctttctccatgacggtctataagtgcacggaaatctttgaccaggtggttgaggacttcatcaagacgggtgtgatgcctacctttgacatccagacctccaacgatgaccccgccacctccgttggccggagcaccaagatttacaacaactgcgtgctggacggtgatgtgctgctgtccatgttcaacgcagagggtgactttgtggagcagacccttgagggctactgcgacagcttcacccgccccgaaaagcacaccaacccgtcctatatgtaagggcggccaactaaaggaggaaatcatccatgagtaacctgtccgcatttatgcacgccaatgttgagcagatcgaaaactacaagtttgccgcctccccccgtttcaagggggaggatggcaagcccatgttgtgggaaatctgctgcatctccgctgatgaatacgcccgcatccgcaactcctgcgtccggcaggtgccggtgcccggcaaaaagggccagtacacccagcagcttgatagctacgcttttcaggccaaggtgtgcgcccgctgcacggtgttcccggacctgagcaacgcagagctccagaatgactggggtgttgccaagccggaggagctgctgggcaagctgctcatcggcggtgagtttgatgactatgtgacggaagttttccagctcaacggtttcaagactgagaatgagctggttgatgaggcaaaaaactaatagaggacggtgacccagaggccagctatgcacacttctgtctgcaaaagtttggctgggagccgtccaagtttttgagcctgcccgtcaaggagcgtgcttttgtcatcgcctctattgatgcccgctgtgcggcggagcggaaaaaagaggcggaactcaagaacaaagcaaaacgcaaataaggctcccgccctgagcgatacagggcgggagcttttcccaaggtggtgaaactatggcaactatcagatcgcaaatggtcctcaatgacgggatgagcgccgtgctcaagaggataacctccgcacttgacactacgctcaacgcctttgagcaggtccagcgtgcctctggcagagctgttgatgccgcccagattgcacaagcacgctcccagcttgtgggagcaaatgccgaaatccaggagatggcggacggctaccgcagagccgcagagcaggaggaaaacctcaaccgaggcctccgcaccggcggctccctggcagatggtatgctgggcaaggtcaagaccctggtggccacactggccgccggtgccgggctcaataagctcatcggcctctctgaccagatgaccagcaccaccgcccgcttgtctttccttgtggatgacggcggcagcgtggatgagctggaggccaaaatcatggcctctgcccagcgctccagagctgcctaccttgacacggcatctgctattgccagcatgggcgcaaacgctggagccgctttcagctccaatgatgagctcattgcttttatggagcaggtcaaccgccagtttaccattggcggcgcatccgcccaagggcaggcggcggccatgctccagctcacccaggcaatggcggcaggcgctctgagaggcgaggagctaaactccatccttgaaaatgcgcccggcatcgccagagccattgagcagtacatgggtattgcagagggctccatcaagcaatatgcccaggagggccaggtcaccgccgaggtggtcaaaaacgcccttttctctgtggcagatgaaaccaacgccaagtttgagagtatgcccatgacctgggcgcaaatctggaccaacatgcaaaaccgggcgctccagacattggaccccgttctcaacaagctcaacaagctggccaacagtgagcaattcagcacggtggtggacggagccttgaacgccttggccaccatcacggcccttgcctccggcatccttgatgtgttcgtcaacatcggctctgctgtggttgataactggtctgtgattgagcctattgcctggggccttgtggctgcacttgtggcctacaacgccgtggcgctcatcactcaggccatcaatggcgctgtggcgctctctgctggcgtgaaagcggcggcagagatgatgagcactggggcaacctttgccgctacggcggcacagtacggcctcaatgcggccctgctggcctgccccatcacctggatagtggtgggggtcatcgcccttgtggcgggcatcatcgccctgtgcaactggattgctaagaccaccggcgtggcggccacgggctttggagttatcaccggcggcatcaatgtggccattcaagccgtgtggaacgccatgcttgtggtggccaatgtggccattggcatctggaacgctctgggtgcctgctgctccaacatcggcaccgctttccacaatgtcatctccaatgtgcaaggctggttttacggcctgctgtctaccgctctcaccgttgtagagggcatctgtgcggctttgaacaagctgccctttgtcgagtttgactactccggcatttccgcaaaggcggatgaatacgccgcaaaatcggcggaggcctatggcagtgttgaggagtaccagaacattggggacgctttcaccaaaggctacaacacctttgacacattcacggatggctgggcctctgatgctttcaaggccggtgcatcgtggggtgacggtgtggctgataaggtgagcagtttctttgacttcggcggaggcggcaccggcggcacggaccttggcagcggttttgacctgagcagcattgctgacaacaccgggctgaccgctgacaataccggcaagaccgctgatgctctggccgtgacagaggaacagcttgaatacctgcgggacatcgcagaaagggatgcaatcaaccgtttcaccaccgcagaggtcaagattgacatgaccggcatgaccaacagaattgacggcagtgctgatctggacggcgttatcagccagctcaccgagggctttactgaggcgctggtcaccgctgctgagggggtgcacgcatgagttattcctgttacctgggcggcgtggagtggcccactcccgccaagctgaccgtaaaaatcaagggcaaaaataagacgctcacgctgctcaatgagggtgaaatcaatttcctccgcacccctgggctgagtgagatcgtgctgccggtgacgctctcaatgctcaccggcagccggtccccgtcctactacatgggcgtgttggaacggctcaagacctccaagggcaccacccagtttattttggtgcggcgctccccggatggacagcggctgttcgacaccaacatgactgtgagcgtggaggactacaacatcacggaggatgccaaggagggcctggatgtcagcgtggacatcaacctcaagcaatggcgctcctacggcacgaaaacggccaaggtcgaacagcccagcaccgacacgggcaagcagaccgtgaccgtggaaaaggagcgggatgccagcacggccccctccgctaagacctacaccgtgaaaaagggtgacaccctctgggccatctccgccaagtattatggcgctggggcccagtacaccaaaatctacggggccaacacggacaaaatcagcaaccccaacctcatctatcctgggcaggtgctcaccatcccatgagctatgagctgctgatacaacatggtagcaatatcatgtacccacccacggtggagggtgtcaccattgagtgggaacgcaaaggccagccgggcaagctcacctttgaggtggtaaagaccccaggcctgagctttcaagagggggacccctgccgtttttccgtggacggcacccccgtcttttatggctttgtctttgagaaatcccgcaagggcaacaaccccaatgtcatcaagtgcgtggtgtatgaccagctttattacctcaagaataaagatacctatgtctacaccaacaagacggcctctgaggtcatcaaaatggtggcggaggacttccagctcaatgtgggagagcttgaggacacgggctacaagatcgccagccgtgtggaggacaatcaaaccctgtttgacatcatccaaaacgccctggacgaaaccctaaaggccaccgggcagatgtatgtgctctatgacaatgttggaaagttgaccctcaagagcctgggcaacatgaaactcaacatgcttgtggatgaggacaccgccggtgactacgactataagagctccattgccacccagacctatgacaaaatcaagctctcctatgagaacaaggaaaccggcaagcgggaaatctatattgcccaggatggctcccacatcaatcaatggggtgtcctgcaatattatgagaaactggacagcaaggccaacgccaaggcgatggcggacgctctcctggacctctacaacaccaagacccgcaccctcaagctccaggatgtccttggtgacatccgtgtgagggcgggcacgctgctggtgatcatgctgggcctgggtgacatcaatgtgtccaactacctcatggccgaacaggtcaggcacacattcaacgatgggcagcacctcatggagctcaaaatgcgaggtggtacatttgtcgcttgacatcaatgagctggtccgtgctgtgaaacaggcggcggtggaggcggtcaaagcggacggccccatggccgtgagctttggcactgtgacatccgcctccccgctgaaaatccaggtggaccagaaaaagaccttgacggaggcccagctcatcctcaccaacaatgtccgggacttcaatgtggacatgacggtggaccaccagacggaaagccaaagcggcggcagcggagaggctgcttttgccgcccaccagcacgcctacaagggcaggaaaacctttaaggtgcacctggccctcaaggcaggggaaaaggtcatcctcatctcctgtgatggcgggcaaaaatacattgtcctggacagatgggaggcaccttgatgggaacgctaccgacaactggagaaaaccttgacctcatcggctttgagctggaggagcagcccagctatactcacaagctggacattgaggggcagcgggtggctggcatgaccgacaagcgggaggccctgcgccaagcggtctatctcatcctcaatgtggagcgctacgcctaccccatctattcccgcaattatggctccgagctggttgacctgatcggccaacctatggactacgccatgagtgagatgaaaaggcgcatcacggatgccctgatgcaggatgaccgcatcaccggcgtggatgactggacctttgaaaccggcagaaagtccgtgctggtccgctttaccgtctacaccatttatggagagctggaggccacaaaggaggttgagatttaaccatgtttgaaaccaagacctatgaggcgctgctggccagcgccttggccagggtgtcctccggcatcgacaagcgggagggctccatggtgatgaacggtgtggctccgtccatggcggagctggcccagctctacattgggctggacttcgttttcaccgccacatacctggcaacagcgccccgtgaatatctcatcaagcgggccgctgaccgtaacatgagcccctacctgcccagcgccgcagtgttccgggcggagtttaacattgaggtgccggtgggcacccgtttctcctgcgaggacctaaactttgtggtgacggcccgcatggacacctccgaggacaccgccaccggcctgagccaccgggtcacctgcgaaacagcaggggcccatgccaacggctacaccggccagctcatccccattgagtatgtggacgggctgacccatgcagagctggtggagctgctaatccccggagatgatgaggaggacacggaggttttccgccagcgtgtccttgacagcttcaagtcccaggcctttggcggcaaccaggctgactacatcgaaaaggtgaaagccatgcccggcatctccgccgtcaaggtgcacccggtctggaacggggacattgcgccgtccacgctcatcccggatgctactgtcacagcctggtacaccagcgccattgcggggctcagtgagcccgtggcggcctggctcaccgccgtctacacggcggcgctcaacaaaaagctgacggtgggcggcaccgtcaagctggtgctgctggcatccaataacaccgccccctctgaaaccctcattgatgaggtgcagacggcggtggaccccaccgagaacgccggggagggtctgggacttgcccccattggccatgtggtccatgtgaccggcgtggagccggtgccggtgagcatcacgctcaatctgacctatgcctccggctggaactgggaggccatcaaaagctatgtggaggccgtcattgacgactattttgcagagctggcaggcacctgggccacttcggaccacttgaccatccgcatctctcagattgaaagccgcatcctctccgagtgctccgatatgataacggacattgctgacacgcagatcaatggcaaggaggaaaaccttgtgctgggtgcggacagcatcccggtgaggggggacatcaatggatagaaagctccttgactacctccccccggtgctccgtgaggtgcttgagtttcaagccatcaatgccgccaatgagccggaaatctccattgcgtgggacgctctggccctggtccttgccaaccaattcctggacacggcaacggccagcggcgtggccgtgtgggagcgtgagctgaatatccgccccaaagacacggacacgctggaggtccgcaaggcacgcatcaaggccctgtggaacttggagctgccctacactctgccctggctcaagaactggctcaccggcctctgcggtgagctggggcatgaggagagcattgtggactacaccatcaacatccagcttgactacaccgtcctgccggatgcggatgccctggcggcggaaatcctggacatgctcctcatggtgcgcccggccaacatgcgggtgctgatgacatcttttttgcagtcatacggcaccatcacctgcggcgtttacaccgagtatgaggatgaggtcaacatctggcccatgatggtccatgaaatggaaagcaccggcaagtccattgctgtgggcgctctggagtatcacaacactgtggagatttacccacaagaataggaggaaaaagcactatgcccaatgaaaccaaaaactatggcaccgttatcaccacggcgggcgctgcgctgatcgccaagtgtatcttgaacggcggcaaggtcaacatcaagaccgctgctgccggtgacggcggcggtgagtattatgagcccaccgtggcccagaccgccctccggggcaaaaagtgggagggcgatgtggccagcgccgcagtcagcaccaccaacgccaacatgattgatgtgaaaatcaccattgatgacagcgtgggtggtttcactatccgtgagatgggcctctttgacgatgacggcacgctcattgccatctgcaacacccccgacacagaaaaggtgtccacggatggcggcgtgtccggcaagctcaccatgattatgcacatcgtggtagcggatgcctccgttgtcagtttcaccatcaccccggccctggacacagtgagccgggcggagatggagagcgccctggcagagcacaacaccaacggcaccagccactccgacatccgggcgctggcgctcaatgctgtgcagcagggcgatgtctacaccaagccggaggtcaacgctttggtggggggcgctgtgaatgagcataacaactccgacacagcgcacgccagcatccgtgtggacctcacggggctggatagccgcctcaagacgctggagctgaaatatggcaccaatgtcaccggcagcagctttgaggtcacctttgttacgctgacggatgtagtggtcaccggcgtatggaatgaggaacttggccgaattgagttttaagatgcggaggtgaacaagatgcggagaggcacaaaccctgtgctgacctttgagctgccggaggcaatcactatatctgccctgtatatcacttttcagcagaacaggcaaactgtgctggaaaaggacctcactgctgtcacctatgacaaagaaaacggcatcatcacgctgccgctttcccaggaggacacgctcctcttttcggagcttgagcctgtctgggtgcaactccgcctacgggacaatctggacaacgccattgccagtgagcccatgcgggtcaatgtgggggagatattcaaggacggggtgatctaatgtgacctatgcagtaaactttgaaaccacgcccagggtcattgcggtcaagctctccaccggcggcatgatgcacgccagctttggctctgtgcagtatgtcaacaccggcaagcaaggaattgacggcaccactttttacccctctgtggagggcgatgagtgcaccctgagctggaccaatgacggcaacaaagaaaaccccaagcctgtcaatttgaggggccgccaaggcccccagggcgctcctggcagtgacgcagacatcctgcccatcacaaacctggagcttgaaaaactactcatataaggaggacagccaaaatggcaaacagcaagaaagcgcttgatgaaaatggtgtactttacctgtggggtaaggtcaagacctatgtggccacggccattgccaacatcaagctgcccagcaagacctctgatctgaccaatgacagcggtttcatcactgccaaggatgtgccggagggcgctgccgcatccagcaccgtgcccaagatggacggcaccgctgccgctggtacggaaaccgcttttgcccgtggtgaccatgtgcacccctctgacaccactaaggtggacaaggtggagggcaagggcctgagtgccaatgactacaccaacgaggaaaaggccaagctgggcggcgtggaggccaacgcaaacaactacaccctgccggatgccagcgcctccgtcaagggaggcgtgactgttggcaccaatgtggatgtcagcggcggcaaaatctccgtcaagaacggcaccaccaaccagaaaggcgtggtgcagctctccagcgccaccgatgacaccagcaccaccaaggccgccacgcccagcgccgtcaaagccgcctatgacctggcggcaggcaagcagagcccggccacctctttggcaggctacggcattgcagatgcctacaccaaggatgaggtggatgccaagatgtccagcgcccttgaatataagggctccaaggacacctatgcagacctgcccaccaccggcaacaagaaaggcgatgtgtggaacattgtcaatgccgatgcggcccacggggtcaacgctggtgacaatgtggcctggaacggcaccacatgggatgtgctggccggtacgatggacttgtccgcctacatgcttgcggaggaccttgtggccatttccaacacagagctggataatatctgcaagtaaaggaggccaatgacatggcaaaaaggccctaccttgatgacctccagacagcacgcctctgggcaaaggtcaaggccctggtttctcctttgagctccagagtgaccacactggagggacaggtccagaccaacaccacggacctctccggcctggccacccgtgtccgcacgctggagctgaaatatgacaccaatgtaaccggcaactcctggagcgtggctttcaccagcctctccggcgtggtggtcactggtgtgtggaatgaaagccaagggaggattgagttttaagtgcccaactatgacatcataccgcttgccactgatctgctggactacaccatccagcgggtcaaggtcaaagagccccaatacaccaaggtcaaggcctatgtgatggaaaacggccagatggtggaaaaggagctctttgagaaaatcaaggatgacggcaagcctcactttcccaaaagccagactttccacatgtgcgctgacatgcagcgcatggccagcgccatcctccagaaatgcaactccgctgatggccgttattttgaaactgagtatgaggaacgcctcaaggaccttgatgaggtcatcgtcctctgcgacactctcaaccagtacatcaacctgagctataagcgcaagtacatctctggtgaccagtgccactactgggcagagctggtgcgcccggtccgtcaaaaggctttcaactggaaacgcaatgacagcaaccgtgccgccgctctgcgtgaggcaaaggccaaccaggaacttgccaaaatgggccagatggcccagcaaattgctgaggccctggcacgcaacccctgaaaggatataccagccgagagctgttatatttgggtatgacctatttttcactgtgctccccgaacacgaacaacaccaacaacgccgtttacttgaacaccaatggcaatgtcaacaacaacaactgcaccaacaccaacgggtcccgccccgctctgatggtaaggcctgactgagtaagcccaaagcccaaaaccgtgccgtccatcacatcaaaggaggtcatacccagccttggtgatgccaaggcaaacacattgcgctgatgccccgctgctttccagaaaagtggcggggctactggtcctatcatgcggcacctacacagcgcatgaggagaggctggccagccgaacactgatagggggccatccgtttgtatgaaattttctgaaatatgcacctttgcagtgatctatgcggcatacctggccgcccggcggggcaaacgctccagagccgccaccgcacactatgaggtgcgcctgcttgagaacatcgtcaacctggtctatatcctaaaaaccaagatttacagacccggtgtgtttcgtgtgttctatgtctatgagcccaagaaaaggctggtgcaggcacccgcttttgtggacaaggtggtccagcacgccatagtggacaatctcctctatgaccgcatcacccgcagtttcatcctggacaactacgcatcccaaaagaacaagggcctgcacttcggcctggaccggctcaaaggatttttcacggactactggaataagcaccacaccgctgagggctgggtgctcaagtgtgatgtccgccatttctttgcaagcatcaaccatgacaagctcaaggaaaagctcaaaaagctggaccttgagcctgttgtttatgacctgctttgcatctatattgactgctctgacggcctgccgctggggtatcagacatcacagctctttgccctcctgttcttggatgactttgaccacttcgtcaaggaacagctccgcatccaatactatggccgctacatggatgactttttcctcattcacccggacaaggaatacctgcaattctgcctccgggaaatacgggcctacatggataacctggggctggaactgaatgagaaaacccaaatctttcccatccgcaacggcattgactttttgggctttcacacctacctgacggagagcggcaaggtcatccgcaagctgcggcacagcagcatcaagcggatgcgtgccaagctccgccactgggaaaaggaatacccagcgggcctggtgacccgtgagcaaatcctgcaatcctggcaggcgtgggatgcccacgccgcacatggcaacacttgggccctgcgccaacaggtgcgggaccgtgtgcaaaatattctaaaggaggaaatctgatctatggccacaaccaccctgggcaacaaagctgtgggcagtatcatccagctcaaggaaaatggcaagctggtgagcttctatgttgccaagcacaactatgagaactccctcaacggcatgggccgcacgctggtggtccgcaaggactgctatgacacccgccagtggcacagctccaatgtcaatgcctacgcctccagcgccattgatagttggctcaacagcacctacaaaaacctgcttgatgcagacatccgtggggtcatcggcaccacaaaaatcaagtacacccccggcaacggcaacaacaccgttggcacgctccagcgggccattttcctgctgtctgccactgagctgaacagatcggcaagctggtttaatgtggagggcacggcgctggaaatcgccagctctctccagatcgcctacatgaacggctccgccgttgttcagtggacccgctccccgtacacggtcagcacctactacgccgtttacttgagcaccgatggcaatgtcaacggccactactgcaccctcacctacgggtcccgccccgctttcactctcccctccaccctctctgtgagcgatgacggcactgtgtccgtcaacactgcgcccaccatcaccagctccacggccaatggctccaacctgggcaccaagacggcgggctttaacttccagtacacggtcaatgatgtggacggggacactgtgacggtcaaggagtacctggacaatgtgctcaagcgcacctacaccgcaaccctgggccaggtcaacacattccaagctgtcacggctgccaactggcagaaaatcctcaacggctcccacaccctcaaggtggtggcctctgacggcaaggctgacagcgccgcctacacggtgacctttgccaaaaaggtgaccaaggccactgtcacgctggcagcgccgctggcggcggatgatgccatttctgtgatggttatgaacatcgtgggcaccctgcctgcggatgcggtcatggaggtgctggtcaccaacaacgccaaggacaccacccccgtctgggaggatgccacggcggatgtcaagaatggcgcaaaccatgtgtttaccaataagaccgccgccaacggctttgcgttcaacttcaagctctctgttgagcgtggggccagcgacaccggcggctatatttctaacatcggaggtgcttttgaataatggctgtttactatgacaacacaagcctcaaggcaaagcatgagcgcaagcgttccctggaggaactgaccaaggaaaacaaagagctcaagacccggctccaagcaacggaggaggacctgaccaacacccaggtggccctcacggaggtctatgagatgctggcaggaggtggagagaatggctaaggtatatgccgccctcatccgcaagggcctcaagaccctggatgatgtccccgccaacctgcgtgacgctgttgccaagctgctggaggagagcaccgatgcgtgagctccgcctgcggcttgctttatttctgttgagaaaggaggtgcaagacatggctgttgtgtatgctaccctcatcatcaagggccgcaagaccattgaccaggtgcccgctctgctgcgtaagcaggtggaggaaatcctggcagacctggaggttgaggtctaaagccccagcccagcaggaggggcacacccgtgtggtgtgcccctctcatttttgaacaacaggaggacaaaaaggatgctggaaacgctgaggagctactggtctatcatctccaccatcatcactgtggtagccgtccccgccgttggctacctctacaagaaatacaagcaggcagacgcacggcaaaaggcggtagagctgggggtccaggccctcctccgtgaccgcatcgtgcaatcctattatcactatgaggagcgtggctggataactctgcacggccttgagaatgtcaatgccatgtataaggagtaccatgctctgggcggcaatggcaccgtgacggcgctggtcaataccatccatgagcttgaggtccgggacgataagcgccccgcctctcaggcctgagctggagaggagggcgcatggagttttcaaagaaaatgctggtgctgcacatctgcatttccgtcctcctctgcatcaccacgatagtggggacgctcacggaccatgatgtcacagccattgcggcgctcaccggcacctcttttgtgacagatggtgcctggggcggcttttactactggaaaagcaagaatgaaaaccgggcgaaatacgcccagcgttttctcaacaagtttgcggacaagtacggtgctgatgcggccctccgggccactgagatcgtgctgaaagattgagtaaaggaggacatgctcaatgactgaaaaagaactccggcagaaagttgtggacactgcggtgagctatctgggctgcaaagaggccaacggctcccaccgcaaaatcattgacctctacaactcccacaagcccctggccaggggctatgcggtgaaatacacggatgcctggtgctccacctttgcatccgctgtggccatcgcctgcggcctcacggacatcatccccacggagtgcggatgtgagcgccacattgaccttttcaaaaagctgggctcctgggtggagaatgatgcctatgtacccagccctggtgactacattttctatgactggcaggacggcagcaactacgccaccacggacaacaccggctctgcggaccatgttggtattgtggtgtcctgcgatggcaagaccattaaggtcattgagggcaacatgagtgatgccgttggctaccgcaagctggccatcaatggccgctacatccggggctttggcgtgcccaagtacgcctccagggccacctctgcgccctccggcggcggggaggcacccacgcccggcaaggatgaaaagcccactcctgggcttgctgtgggctccgtggtgacctttacgggcaccaagcactatatcagctccatggccgtcaacggcaagagctgcaagcccggtgaggccaaggtcaccgctgtggccaagtccggcaagcacccctaccacctcatcaagaccaccggcagctcctccaccgtctatggctgggtggatgccgctgatgtcaaggaagtggtcccggccatcgtcaagggctccagggtcaaggtggccaagggagccaagacctacaacggcggcagtctggcctcctatgtctacaccaccgcctacaccgtcattcagattgacggctcccgtgtggtcatcggcatcaacggagtggtcacggcggctgtcaacatcaaggacctcacgctggtggggtaaaggaggaaatttatgactacttccatcatccatctggccgttggcctggtgctcctggtggccgtcaacatcgtgctgggcagcctcaacgccctctttgacggcagttttgacaaggtaaaactccgcaacggcatcatcaagggcatcatcgtggcggcctgttttattgccttttatatggcgggctacctcaacccggacatcatcgccattgaggtggatgggcagaccgtgaacttgatgaccgcctccaacctggcgctgctcacggcctatgtgctctatgccaaagatgtatttgtgaaattgaaaaacctaatcttgagcaagacctccggcacgccgccggaggagcttgccgcagaacaagaaactgctgaataagacgaaagccggagagggtcaaacctctccggcttttttgctttatagggtgatgtcctggcctgtgctgtctatctgctttttaagggcatagagctctttgctttccttgccgcccaaaaaccaaacggccacatgtttgtccccataggtgaaaactgcataccacttgaccgcattggtgcgggaagtgtttggactggtgcctctgtacttggccgcaaaattgcgctcatccatgatgtccaagctgtcaaccttggccagcggcagggtcacgctggggccctccacccggcggaacaccagcgcctccgccgtctgctccataaagcagggcgcatcctgggcaaagccgggcaggccctcatagtgcatgagccggatgccctccggcagcggtgcctttttctttccgaacatgtcaaaacctcctatgctgatctgacccaaaaattgagatggtggatgtactcctccagtggcgcaccctcaatgctttccgcatcattgcggactgtatactgcatccaggtcttgcggccctgcaatttgacttttcccaagtacgctctggggctgctcacggagagagcgccattggccatgcggctgatggtcaatgctacgcttttatgcccctgacgcagtgccgcctccagagctgccaagaaagcctcctcatccggcgtgactgaccacctgcggctactttccgttgtatagcgaatatacacccagctcaccgtccttttctgtttattcttgacttttctccattatagtttgcaccctgtctgcgtgtcaagtattggagcctttattgataatgacataccaaatgtgcaaactataattatttatgagaggaggcggtgcagttgatcgctgagaaaatcaaagccctgcgtgaggcaaggggctggagccaggcggaactttcccggcggctgggcatcaccagaaacggcgtgaactcttgggagcaggggctctctatgccatcaccggcgtgcctggtggacctggccaaggtgtttggcgtgtccacggactacctgctggggctggaacggctcaccacggtggatgtcaccggcctggcggaccgtgatgttgcggtgctggcagagctggccgaacggctcaaaaactgcaaagactgacacagcggctcacttttcgtgggccgcttttttgttcttgacttcatacaccttttggtgtataatcagagtacattaaacggaggtgctgctctatgacccattctaaactgcaaaccaagcgcctggaggcgcagatgtcacagtcccagcttgccactgccgctggcatcaatggccggatgctccagtattatgagcagggtgcaaaagacctgagtggtgccaagctggccacgctgctcaagctgtgcctggctctcaactgcacattggctgacattctccctgacggagaaacaaccgaattgctgacccgatacggacagtaaagccttttctggcggggtgttcatcaccccgccgcttttttatattctgaggagggtatcacatgaattacaagggctttcatcaactgcaatgggaggaccgcctggtcattgaaaagatgctcaaggtgggtgacagcaaggccaagatcgctgaggcgctgggcgtgtgcaaaaagaccatctacaatgaaatcaaacggggatggacccagcagatgacctctgactatgagtttatctggtgctactgcccggagatggcggagcgcaaataccaggaaaacctccgggccaaggggccggacctcaagattggcaatgacattgactttgcaaactatgtggagcagaaaattgtggaggagcactattctcccgccgctttgttggcagagctcaaggcaaagccgccccagtttgacaccacggtctgtgaggccacgctctacaattacatctaccggggtgatgtgttcctggtcctcaacccggagcacctgcacgaaaaaggccgccgccactatggtgagaaatacggtgaacaacggaacgccgccagagctgccaaaggcccccgcattgataagcgtaaccccatcatcaactcccgcactacttttggccactgggagatggacagcgtgatgggcaccgtgggctccagccgggcgctggtggtgctcacggaacggctcaccagggcgggcatcatcctcccggtgccggaccataccgccgccagcgtggtccgggcgctcaatggtctggagcgccgcctgggcaaggacttctaccccatgtttcagagcatcacggtggacaatggctgtgagtttcaagactacgatggtatggaaaaggcctgccgccggaaaggaaagcgtaccaccgtttactactgccacccgcacgcaccacatgagcgtggcagcaacgagaacatgaacaggataataaggcggtttttccccaagggcaccaactttgatgaggtgcctatctcagagatacgccgggcagaggagtggatgaacaactatccacgggaggtgctggggtggcagacagcggccaccctcctgcggagctacatgagcgcctgctgatctgccgcacaataaagctgaacgccggagccctcggaggccaccggcgctgttgtcatgccaaaatgcagaaaaacgcacaaaacaagccgcaaatagcacggctaattttgtgcgttcatacaactttacaagtttattgtaatttattcttgactttttgcggcgggctacctaaaatctgatgtgagattttttattttaagcgttttaagacctgcggttgctttaaaacctttttatccatgataaaagcttcttgttctttgttttgcccgctctattctctaatacataaacccggcttcaagtcaagttattttttcatgatcggaaaagtgaaatgccgcgtgcccaataggcacacggcattccacttttcaggagagaaagtaccccgtttgcaagggtacggaaccacagggcctggcggagcccggtgggatcggaagcaaagttactccacgccaaacagcagatcgccgtaggtggggaacggccagcagccctcggccgtgcgctgctcggcctcgtcacagggggcgcgcagcgccgccatcttgggcagcagcacgtcgcggaccatgttggcgctctcggtcacatcatcgatcttatggaaagtggccagcgcggcagccaggtcctccacggcagcgtcgatgtcctctaccagatcggacaggcgcgtgacaagcgtcgtctcataaatgccggacaccaccggcgcgatggacttctttacggcgatatcctgcgccagcttagaggagaacttctccacggcaggcaggatctgacggcgggccatatccaccatcgtttcggcctcgatattgacgatcttgcggtagttgtccagcgtgatctcatagcgggagcgtatctccgcctcggacatgaccttcagggacgtgagcatttttacgttcttctcgtgcagcagatagggcatagcgtccggcgtggtacgcaggttcaacaggccgcggacctcggtagcctccttgatccaggcatcgtcatagccgttgccgttgaaaatgatgcgcttgtggtccttgatggtctgccggatcagactatgcagtgctgcgtcaaagtccttggccttctccagcttgtccgcgtactgacgcagagactccgccacggcggcgttgagcataatgttgcagcaggcaatggagttggcggagccaagcatacggaactcgaacttattgccggtgaatgcaaagggcgacgtccggttccggtcggtggtatcacgcaggaacttgggcagcacatgggctcccagcttcatcacggtcttttccgtgccgctgtacggctcatccttctcgatggcatccagaatagccgtcagctcatcgcccagaaagatggataccaccgcgggcggcgcctcgttggcgcccagacggtgatcattgccggcggtggccacagagatgcgcagcaggtcctgatagtcatccaccgcctgaataacggcacacaggaacagcaggaactgggcgttttcgtggggtgtctcaccgggagtcagcaggttcacgccggtatccgtggccatagaccagttgttgtgcttgccggagccgttgacgccgtcaaagggcttttcatgcagcagacagaccagcccgtggcgggcagccaccttctgcatgatctccatggtcagctggttgtgatcggtggcgatatttgtggtggtgtagatgggcgccagctcatgctgggccggggccacctcattgtgctccgtcttggccagaatacccagcttccagagttcctcattcaaatcggccatatactccgccacacgaggcttgatagcgccgaagtaatggtcgtccatctcctgacccttggggggtctggcaccgaacagcgtacggccgcagaaaatcaggtccttgcgcttgcggtacatggcgcggtccaccaggaaatactcctgctcggggccgacagaggtgcgaacacatttgacatccgtgctgccaaacagcttcaggacacgcatggcctgcttgttcagggcctgcatggagcgcagcagcggggtttttttatccagcgcctcgccaccgtaggaacagaacgccgtggggatacacagtgccttgtccttgataaaagcgtaagaggtaggatcccaggcagtgtagccccgggcctcgaaggtagcacgcaggccgccggaggggaagctggaggcatccggctcaccctggatcaattccttaccagagaactccatgataacgccgccatccggcgagggggtaataaagctgtcgtgcttctcggcagtaatgccggtcagcggctggaaccaatgggtaaagtgggtcgcgccgtgctcgatggcccaatccttcatggcatccgccaccacattcgctacctggttgtccaggcttccgccctcgtcaatggtcttcttcagggaaatatagatgtcatggggaaggcgtgctttcatctgtcggtcgtcaaataccagtgtgccgaaaatgtccgatacggttttcatgtgttccaccccgatcttttgtagatttggaaaatagaaaaaggcgtcaggaagcccgcagcttcaagacgcctttgcctttgatgtgcgaaattataggcggttgtgacggatttgtcaatcagctttttacacaatttttggcgttttattcattgactttatgcacatctgatgctataatgccgaaccatgatgagcaaaggcgttcatccgagcaggacatttgtccctgccggatgggcgttttttgctttccggggcggcttttcagcggatcactccatggaacggctggaacctacggaagcacataaagaaagggtgagaaactatgaagctggagggacaggtacgcatcccatccgggtgcgccatttcggcggtcatttcccgggaggggcggcgcatgaccggtgaggacatcatcaggagcatggtccccatgcatgatcggtccaacggtctgggaggcggcttcgccgcctacggcatctacccggagcaccgggaggaatacgccttccacatcttttttgatgataacaccacccggcgggagtgcgaggctatgctgaaggagggatttgagctcgtagacgcggagctgatccccatccgcatcatcccggagataacggacattccccacatctggcggtactttgtgcggccccttaattcggtactggcacggctacaattagacgaaaaggaatttgtggcacggacggtgatggatatcaacaccaagctgaagggcgcatacgtgttctccagtggaaagaacatggggaccttcaaggccgtaggatatcccgaggatgtgggacgcttctaccgcctggaggaatatgagggatacagctggacggcccatgggcgctatcccaccaatacccccggctggtggggcggcgcgcaccccttttccctgctggactggtccatcgtccacaatggagagatatcctcctacgacgccaatcggcgctgtattgagatgtatggctacaaatgcaatctgcagacggatacggaggtcatcacctatattgccgactatctgctgcggcgtcaggggctgacactggaggaaatggcgtcggtgatcgcggcgcccttctggagtaccatacgcaccagagagccggccgcggcacggcagctgacctatctgcggaccatataccccagcctgctcatcaccggaccattctccatcattctggggttcaacggcggactgatggcgctgaacgatcggctgaagctgcgctccatggtaacggcggaaaaggacgacaaggtatttatcgccagcgaggaggccgctatacgggtcatggccccggatgcggagaacctgtatgcgcctatgggcggcgagccgtttatcgtgaatgtgaaagaaggtgcctattgatggctcttgactacatcataccagaatttgaagtggtacgaaacgacgcacggtgcacccgctgccgcatctgcgaatcccagtgcgccaacggcgtgcacacctataacgcggatgggaaggtcatggtcagcgacgagagcaagtgtgtcaactgtcagcgctgtgtgtccttctgtcccactcacgccattaagatcgtaaaaagcgacaactgcctgcgtgaaaacgcaaactggtcctgcgccaccatcaaggagatatacaagcaagcgtccaccggcggcgtgctgctgagctccatgggcaacccccagcccctgccggtgtactgggaccgcatcctcatcaacgcctcacaggtgacgaacccacccatcgaccccctgcgggagcccatggagacgcgggtattcctgggcaagaagccggagaccgtccggcggaatggggacggcagcctgtgcaccgaggtaccgccgcagctggagctgtcggtgcccattctgttttcggctatgagctatggctccatcagctacaacgcccatgcggcgctggccaaggctgcccgggagttgggcatctgctacaacaccggcgagggcggactgcaccgggatttctatccctacggcgccaacactatcgtacaggtggcctccggccgcttcggcgtcgatgagacatacctgaacaccggcgcggccatcgagatcaaaatgggccagggtgccaaacccggtatcggcggacatctgcccggcgcaaagatcgtgggcgacgtgtccaaaacacggatgataccagagggcgcggatgccatctcccctgctccgcaccacgacatttactccattgaggacctacggcagctggtgtactctctaaaggaagccacggcgtacaaaaagccgatcatcgtcaaggtggcggcggtacacaacatcgccgccatcgccagcggcatcgcccgcagcggtgcggatatcatcgccatcgacggctttcggggcggcaccggcgcggcgcccacccgaatacgggacaatgtgggtattcccattgagctggcgctggcagcggtggaccagcggctgcgggacgagggcatacgcagcagcgtatccctgatcgccggaggcagcatacgctccgctgccgacgtggtcaaggccattgctctgggcgcggatgcctgttacattgccaccgcggcactgctggccatggggtgtcacctgtgccgttcctgtcagacaggccggtgctgctggggtatcgccacacagcggccggagctggtaaagcgtctggaccccgaggaggccgcggcgcggctggtaaacctggtaaccgcctggaagcatgaaatcaaggagatgatgggcggtatgggcatcaactccatcgaggcgctgcggggcaaccgggtcatgctgcggggtattcacctgaacgaaaaagaactggaaattctgggaattgcccacgccggtgaataaggtctgtcgaaaaagcgatatttataggaaaaataatggaaaacactcgaaaggagtggtacaatatggacttcatagaggcaagtggtctgtccttctctcaactgaacgaaacgatacgccacgccgggaaggaatgccgtatctgtgcctgccagggccagcggttcatcgccgccggtatgagcagcaaacggctggagatcgacggcatccccggcaatgcgctgggcgcctatctgggcggcggttctattaccgtaaacggcaatgcacaggacgcggtgggcgacaccatgagtgccggacgcatcgtgatccacggcagcaccggcgacgctgcggggtacgccatgcggggcggtgagatatttatccgggacaatgcgggctaccgcgccgggatacacatgaaagcctataagcagtataagccggtgatcgtcatcggcgggcgggccggcagctttctgggcgaataccaggccggcgggctgattttggtgctgggcctgcacaccgacggccggccgatagtacacttcttcccctgcacaggaatgcacggcggaaaaatggttttccgcggcgatgtgagcagcatacggtttccggatcaggtcacgctgcacaacgccacggcggaagatatggaggagatcacaccctatgtgcgggagtactgccgtctgtttgaccgtgacgcggaggcgatgctccgcgacaactataccgttatcacaccggacagcaaaaacccctatcagcagatgtatgtagccaactgagaaaggcaggagcacgatggagtacacagtggatgagatcaggcagtttacggcggaggaggatgtaaaattcctgcgtctggccttctgcgatattttcggcagccagaaaaatatatctattttgccggatgagctggaccgggccttcagctacggcatcgctttcgatgcctccgctgtgcccggcttcggcgacgaggtccactcggacctgttcctgcatccggacagcagcaccctctgtatgctgccctggcggccggatcacggccgagtggcgcggatgttctgccacgtgctgcggcccgatggcgccgccttcgaggccgactgccgcgcgctgctgcgtcaggcggtggcggacgcggaagcactgggcatccgtttctccttcggcacggagatggagttctatctcttccgccgggacgaaaacggtgaagcgacccacattccctacgacaacgcaggatacatggacatcgcaccggaggacaagggcgagaatgtgcggcgggagatctgcctgacgctggagcagatggggatacgaccggagtgctctcaccatgagcagggccccgggcaaaacgagatcgactttcgctattccgatcccttgacggcggcggataacgccgtgacctttaaggctgtcgtcaattccgtggcggtgcgaaacggcctggcagccgacttctctcccaagccgctgatgggacagccgggcaacgggatgcacatcaacatctccgccaagagccgcgacggcgcagaggtaatgccgcagatcatcgccggtattctggcccatattgccgagatgacggtgttcctgaacacgcgggaggagtcgtatcaccgctttggcagcagcaaagcaccgcgatatatctcctggtccagcgaaaaccgcagtcagctgatacgcatccctgccgcgcagggcgagtaccgccgcgcggagctgcgctctcccgatccgctgtgcagcccgtatctggcctttacgctgctgatccgcgccggcctggacggtgtaacgcggcagctggtgctgccggaagccgcggatgtgaatttctacacggcggctaacgacgtaaaggcacgcttccacacgctgccggagactctggaggacgccagatcgttggctgcatccagcgcatttatcgcagagcacttacccaagacgatcatacagcagtacacccactgagccggtctgctttggagaggagggacgcatatggaggacagccgccggacgtacagcgtgctggtggtcgctgccgcagccaagttccatatgtccctgcgtgaaatgctgccggaggatcggtacgacccggtgtgtgccgcaggcagcgtgtctgaggcacggcgcgccctgctggagaggccttttgacatcgtggtcatcagtacgccgctgccggatgaattcggcacgaagctggcgctgcacatcatcgacaaatccagcgccggtgtgctgctcctggtgaaggcggaacactatccggatctggcggcacggctggcgcctcaaggcatcctgctgctgcaaaagcccaccacgccaccgctgctgctgcaatccatgcagctgctgtgcggcacacgggagcgcctgcgacgtatggaggaaaagactgccaccatcgaggaacgcatggcggagatacggctggtgaaccgggctaaatgggcactgatcgacaagcaaggcatgacggagcaggaggcccaccgctacattgaaaaacaggccatggaccggtgcgttacgcgccggacagtagcggaggagatattggcagagtgaaataagcgcgctccctttgacaaacggtacaaggtctggtatgatggcggaaaccgtttgaaaggagcacactatggaaaagtttatcccttatgaaaaactctcgaaaaaagagaagcaccggcgtgacgctatgcagcggggcacctggtgcgtgctgaaccccgttacacgcaaaagtccaaaccccaaagcttacaacaggaaaaagacacggaaatggatggaggatccatataccgtgtctttttttatatgcagaaaagatatcccccggccgctggccgggggatatcaaaggaatgacagcttacttcatgaaggtgccgtccatcatctgctgcagataggcgttatacttctccaccttctcagcgggaaccagctcggtattgatggcaccggcggacagggcaccgttctccagcgtaccgaagatggtgttgccgccgaaggtaccggccacaacagcctccatgcagacaccgatcatagcggcgttatcggtgacctgggagcaaatgatgcaggggttctgacccaggatatcggcaggctggccgatgtcgtagatcttgatggcgccagccttctcattggcggcgtcgatggcctcacgggcaccggagtcaacggcagaagcatcgccgaagaacacgtcagcaccctgggagatcagctcagtggcgaactccttgcccttgggggcatcggagaaggagttggcataggggacagccagcagctcaacggtcttgccctcctgcccgccaacatacttggcagcagcctcgaagcccgcgatcttgcccttggtggtatccagctccataccgccgatgaagcccagtttgccggactcggtcatcagaccggccagagcgccggcgatccagccgatctgctcagcgttgggcagcagagacgcgacattgccgttagcggccttttcgggggtggactcagcgccgttcagcagagcgaaggcgatgtcgggatactcctcagcagcctgcaggaccgcatcggtgtactggttgccgggagcatagatcatgtcgtagcccaggttgcagaaggcaacgatggtctcgtaatactgatcctgggagatggagtcggtgacgtcgtaggtccagcccttgtcctcagcagccttgaccatggcgttgtagcaggcagcgccccaaccgccgtcgttgatgctggagtcgcagatcatggcgaccttgtaggtcttctcgccatcaccggcgccgtccgtcttggtgtcgtccttcttctcgccgcaggcgacgagggccagcgtcatagcgagcgccagcagcagtgcaagaaactttttcatggttttcctccttgttttttgtgacttgctctttgttctataacaacgtccttgcggacatcattaccgtcatgtcaccgctgttcgcggcgatagggctgtccattggccttgggtcccgcctgcttcgtaccgatgacggagaggacgaccacggtggccacataggggatcatctggaagaactggtacgggatggcgatgccggagacctgaagccggatctgcagcgcatcgcagaagccgaagaacaggcaggccagcaggatgccgccggcactccagcgaccaaagatcacggcagccagggcgatgaagccgcggccggccacgataccgtcggtataggtgctggaatagcaggtggtcaggtacgcaccgcccagtccggccagcgcaccgcagatcatgcaggccagatacttcacgccgatgacattgatgcccagcgtagcggccgcctgcggatgctcgcccacggatttatagctcaatcccgcacgggtacggttgaagaaaatggaggtgaacaccaccaacagcagcgtcagatagaccatgggactctgatcaaacagcagtggcccgatgaccgggatgtccttcaggccgggaatagcaatgctgggcatggtaatgatctgcttcaggtctgaaccggtaccgaacacgatgcggtagataaacgacgccagcgccggagcgaatatgttgatggccatgccatagaccgtatggtccgcgcagagggtgacggtggaaaaggcgtagatcatattgaccaacaggcccgccaacgcaccgcacagcagaccgatccagttggaaccggtgatgtagcacatcagaaagcccaccagcgcgccgatggcagccaggccctccaggccgatattcaccatgccggcccgctggccgtacaactcggccagtgagataagcaacagagggatggcaagccgaaccgttgccaacagtaagctggagatccaatccattacttgtcacccgcctttctcttggagaacacgcgatccttccacgcctggaattcaggcagcttggtcagcgccataccggccacggagaacacgatgaccaacgcctggatgatatcggaaacgctggtgggaacaccggtggccgcctgcatagtggtggaacccacacgcagcacagcaaagaacaatgccaccaccatcgtcgcgatggggtgcagctggccgatcagtgccatagccacaccgtcaaaaccgtagcccgccccgaagccgttgatcagccggaactgggtacccagcagctctgcgccgccgcccaggccggcaatggccccggagataatgaagctggtcagcatgcagcgcttcacatggataccattaaagcggctggcggtcatgttatagcccaccgcccgcagcttgaagccgccgctggtccagaacagcacgtaatacagcaccaggcccaccaccacggcgatgacaaagccccaggtaaagcgcattccggtgattacacggggcagcttcaccaggtcatccaccgcaggggtctgtggtacgctggcgtcgcggatccagctggtgtacagcacgcccataaacaaggtagctacatagttgagcatgatggagatgatcatctcattctggccgcggccgatcttcagcaggccggggatcatgccccagataccgccggccagcgtaccggccagcagtgccagcagcacaccggcaaagccggtaacaccggagaaatacgccgtaacgaatgcggcgatggaacccatgagaaactggccttcaccgcccaggttgaacacaccgcacttgtacgcgaagcaggcacacagagaggtgaacatcagaggtgtggccttggtaagtgtagtgccaatattggccttggagccgaaagctccctggaagaggtatttcaccgcgtcaaagggattggcacccaaggccgccatgatgataccgccgatcacaaaggccaggataatggacagcagcgggacaacgaagctgcccagagaacgttttaacttttccatatcgcagctcctccccttactttcccgtcatggcgaggctgatctcctcgatgggcgggttttttccggagaattcgcccatgatctgcccctcaaagcagaccaggatgcggtcggacatctccaatatctcatcgaagtctgcgctgatcagcaggatccctacaccgcgctcacgggcagcgatcatctgctcgtgaacaaagctggccgcgccgatatccaggccgcgggtgggatgcgccatcaccagcagggacggctgggactccagctcacgggccaggatgaccttctgctggttgccaccggacaggctgcggaccgtctgccccacagaggtgcagcgcacgtcgtacttctgcaccatctcctcggcatagtcgtgaatggcacgtttgttcagccgcaggcccttaccctggctgaacttgggagaatcagtctccttgagcaccaaattctccgcaatggacatatcgcccaccaggccctgcgcgttgcggtcctcaggaacgtgggaaacgccgtctgtaatgaaagaatgggggtcaaagaccgctacgctcctatccttcaggtatatcttgccgccttggggcacaataacgccggtgatcaactgcgccagctgggtctgaccattgccgtccacgccggcgattcctacgatctcaccgctgcggatctgcagtgtcatatcgttgacaccgctgtgcttatgttccttgtcatagtccacatggtccagagacgccacgacctcagcgccggaggcatccaccttctcgtactgtgactcggtcagttccttaccgatcatcatattggccagtttctgaccatcggtatcagcgcgggccacggtgcccaccacctcgcccagacgcaggacggtgatgcggtcagagatatgcaggacctcgcgcattttgtggctgatgaagataatactcttcccttcgccgatgagcttctgcataatggcaaacaacccctcgacctcgatatcggtcagtgcggcagagggttcgtccaggatcagcagctccgcaccgtggtacagcgccttcagtatctcggtgcgttgctgctcgcccacggatatctcggtgataagcttgtccagctgcacgtccaggccgtacttggcagacagctcctcgatctccttgcggcgagccgcccggtcgataaacaggcccttggcgtgcttgtcacccaggatgatattttcaaagacagtcattgcctccaccagcataaagtgctggtgcaccatgccgattcccagcttgactgcctggctgggggactcgatccgcacctctttgccattgaggaatatctttccctccgtgggctgataaaggccgatgagaatgttcatcaacgtggacttaccggcaccgttctcacccagcagggtcagtacctcgccgcggttgacggtcaggctgatatccttgttggcgtaaaaatcaccaaaccgcttgctgatatgctccatacgcagcagctcgctcaagttccctcacttcccttcgttcgtgtgtttgcagaagttctcattttccacttggaaaatgagaacagaccacggtccgttctcaaatattaaatcgagagtagtataccatatctgtcggattttgggaagaatttttttgtaaaactcctacatttttttagcgttttttatctattgcaccggtaccgttcccatagtataatcaaacgcaacaaagcgaaagaaggtgttgcatatgatacatatccgccccgcagtctctgatgacgccccggcgctgctggatatctatgcgccctatgtcatcgaaaccgccatcacatttgagtatgaagtgcccacgctggatgacttccgccagcgtattaaaaacacactgcacacgcatccttacctggtcatagaacgcgatggcgagatcgtgggctatgcctacaccggacagttgggcagccgcgcagcctacgcctgggcggcggaaaccagcatctatctgcggcaggactgccgtcgcggtggtttgggcacccggctgtaccacgcgctggaggacgcctcccgcgctcagaatgtacaggtgctgtacgcctgcatcgccgcacctgtttcggacggcgacccccacctgactcgcgccagcattgatttccatacccggcgcggctacgaaatcgtgggcaccttccaccgctgcggatacaagtttgacacctggtacgacgtggtctggatggaaaaacgcctgtccgatgccgccattccgcccgccgtggtacccttttcttcttttgtgaagtaaagtcattctgtaatgcatttatactttacagaatatctaaatacagtttattccccacgcaatagataattgcttgtcaacgatccaccttcctgttatactggcggcagtacatacgggaggtatagcaatggaagcaaaggatgtcttgaaggaattacggcaaaggcacaatatgacacaggatcagctggctgaaaagctggccgtcacacgacaggctgtctcccgctgggaaaacggcgagtccgtccccaacccggaaacattaaagcagttgtccgcactgtttgatacctccatcaatcatctgctgggtgaccctcgcaagctgatctgtcagtgctgtggtatgcccttggacagtgatgaggtcatcagccgggatctggacggcagcttcaacgaggactactgtaagtggtgctataccgacagcaagttcacctatgacagcatggagcagctcctggagtttctcgtcacccatatgtccaatgagcaattccctcctgaacaggccagaacctacttcagccagacgctgccgcagctgaagcactggagcaaataatttcttcgaagatataacaaaagcacccgaaagggtgcttttgctatcgatgtgtatagctaattatcgcagcggcagcatgatacatcagcagcgcgcccataagcatcgcccctgccgacctatttccccactcccatggcgtattcgttacggtcaatacaatgaggcatatcactggcagcaatagccaaattgcaaaaagctccacatgatactttgctgtgttccgcatccgtctttcaacggttttgcttattacgtcatccggtacatcctgccgtaattccgccacaaaggagtaactgtcgctgcattcgaagatctctgcacaataggggctgatctcctcctcggcgatttctttcggagatcttccgtgtgcgccccactttccgatatcgtcctgtcggaatacatagaaccgccgcggcaatggcggcgcactctcaaaggagaatgtatagaagcttccaaaattttctacagctataagcagataacccatctctgcttgtttctgcaatacacgctcggcccgccaagtcaaaaatgagggcagccacatttttagctgtttctgctccatgtgtatttcctccgtataagttcaccaccaatataccatctactgcagcagacgtcaatcaggcaaatactctatgtcacggaaagatgccgcaggcataccgaaccgtacttccatatatgccaaaagcctgtgacaaatgtcacaggcttttgtgttggcgctacctatctttccgggccgtctccagccaagtattgtcagcagaagcgagcttaacttccgtgttcgggatgggaacgggtggaccctcgccctaatcagcaccaactgcgctgatcgcagctgctctcacagcacgacctattaaattggagaaaaagtggtgacccgtaccggattcgaaccgatgttaaaggcgtgagaggcctctgtcttaaccacttgaccaacgggccgcatttttcttctatttcatcggccggagccgttgaaaccatggtacaccttcagggactcgaaccctggacaccctgattaagagtcaggtgctctaccaactgagctaaaggtgcatatcgtttgcaccttcaaaaccgaacaatgaagaagtgaacggagaaggctaagattgcctgcaaattgtaggtcaagccctcgggctattagtaccggtcagctgcacacgttaccgcgcttccacctccggcctatcaaccagatcgtctttctgggcccttactccataatggatgagagatctcatcttagggagagtttcacgcttagatgctttcagcgtttatctcgtccgtacatagctacccagctatgcccttggcaggacaactggtgcaccagaggtacgtccatcccggtcctctcgtactaaggacagctcccttcaaatctcttacgcccgcaacagatagggaccgaactgtctcacgacgttctgaacccagctcgcgtgccgctttaattggcgaacagccaaacccttgggaccgaatacagccccaggatgcgacgagccgacatcgaggtgccaaacctccccgtcgctgtggacgcttgggggagatcagcctgttatccccagggtagcttttatccgttgagcgatggcatttccactcacataccaccggatcactaactccaactttcgttactgctcgacccgtcggtctcgcagttaggctcgtttatgcgtttacactcaatgcacgatttccgtccgtgctgaacgaacctttgagcgcctccgttactcttttggaggcgaccgccccagtcaaactgcccgtctaacagtgtcccccgacccgattcagggccgcaggttaggaaaccagcaatccaagagtggtatcccaccggtgactccacacgacctgacggccatgcttctcagtctcccacctatcctgtacatgaattaccgattcccagtattaaactgcagtaaagctccatggggtctttccgtctagttgcgggtaactggcatcttcaccagtactacaatttcgccgggcgggctgtcgagacagtgcccaaatcattacgccattcgtgcgggtcagaacttacctgacaaggaatttcgctaccttaggaccgttatagttacggccgccgtttaccggggcttcaattcaaaccttcgcttgcgctaagctctcctcttaaccttccggcaccgggcaggcgtcagcccatatacgtcatctttcgatttagcatagacctgtgtttttggtaaacagttgcttgggcctattcactgcggcctctttcgaggctccccttcttccgaagttacggggtcaatttgccgagttccttaacaacccttctcccgttggccttaggattctctcctcatctacctgtgtcggtttgcggtacgggcaccttagtgtacaccagagcttttctcgcctcccagcatcgcggacttccctactatatttcggtcccttgcgcccagctctaccaacggctgggtcccgctatctgaaagtgtccttctggtttaaagttcggtggctacggaatttctaccgtatgtgcatcgactacgcctcgcggcctcgccttagctcccggcttaccttgggcggacgaaccttccccaagaaaccttagattttcggccattatgattcccacataattctcgctactcattccggcattctcactcctgtacagtccaccgctgcttccgctgcgacttcaccccgtacacgacgctcccctaccacgcccttgcggacatcctaagcttcggttgcatgcttagccccgttatattttccgcgcagagtcactcgaccagtgatctattacgaactcttttaatgaatggctgcttctaagccaacatcctggttgttttcgcaactccacatcgttttccacttagcatacatttgggaccttagctgtaggtctgggctgtttcccttttgacaatgaaacttatctcacactgtctgactgctgatcatcaattagccggcattcagagtttgatagggttcagtaagcttatcgccccctagcccattcagtgctttacctccggtaatctaaatcaacgctagccctaaagctatttcggggagaaccagctatctccgagttcgattggaatttctccgctaaccacaagtcatcgccggtcattgcaacgaacgtgcgttcggccctccatgagattttactctcacttcagcctgctcatggttaggtcacccggtttcgggtctatggcaacgaactttatgcgccctattcagactcgctctcgcttcgcctccggtactgaataccttaagcttgctcgttactataactcgccggaccgttctacaaaaagtacctcatcacacattaacgtgctttgagtgcttgtaagcacaaggtttcaggttctctttcactcccctcccggggtccttttcacctttccctcacggtactgctcctctatcggtcatcaggtagtatttaggcttggatggtggtccacccatcttcccacggggtttcacgtgtcccgcggtactctggatactggctgtcagtcttctctttcaaatacggggctctcaccctctatggccggccttcccatgccgttcttctagatacctctgatcgtgatgccagtccgaaccccggtgaataaatccaccggtttggcctcctccgcgttcgctcgccactacttgcggaatctcggttgatgtcttttcctgcccctacttagatgtttcagttcagggcgttcccctcgtacgcctattttattcaacgcacgataccagagtattgctctggtgggtttccccattcggaaatctccggatcaacggatatttgctcctccccgaagcttatcgcagcttgtcacgtccttcttcggctcctgatgccaaggcattccccttgcgctctttatagcttgaccttgaggcgacgcggattgcatatccttcgttctgttgtaaacaacagaactcatacattccatcgcgtcgcctcttcttcgtttcacaaacgcttcgctggtttgtgaaacgacacttaaggtgacgcttcgcgtcgactttcgtctaagagattttggttctcttgaattatgcaggcaatctacaggttacttcgcaaaattgtaattgtatacccacatcttttcagatgttccacaattaaatgttttacaaacttcttccaactttcgttgaaagacctctctgttgccttgctttcatcacattcttcattgttcagttttcaaggtgcaatttccagtctcgcttgaaaccagatcgaaacgtacaacctcttgtccgcttccatccatcttcaattcgaaattggtggagatagtcgggatcgaaccggcgacctcctgcttgcaaggcaggcgctctcccagctgagctatatccccatctatctcttttagactgttggtgggcccgagtgggctcgaaccaccgaccttacgattatcagtcgtacgctctagccagctgagctacgggcccatatccacagcccagggacttgtgccctctaaattaaacaacgaacgcgcgctgtgctttgcacatcgccgcaaacgctttcgcgtttgcccagacgtctgaccaggatgtccgccagcgtttgttccgacttttgagtgaattatatgtcgcgctgcgcgcgccatgtaattgctgtcggcactgacaggtctccttagaaaggaggtgatccagccgctcgttctcgaacggctaccttgttacgacttcaccccaattatcgaacccaccttcgaccgcgccctccgttaggttaggctacgggcttcgggtgttcccgactctcatggtgtgacgggcggtgtgtacaaggcccgggaacgtattcaccgcggcatgctgatccgcgattactagcgattccgacttcacgtgggcgggttgcagcccacgatctgaactgggacggcttttaggggttcgctccacctcacggttttgcatccctctgttgaccgccattgtattacgtgtgtagcccaggacataaggggcatgatgatttgacgtcgtccccaccttcctccgttttgtcaacggcagtctcgctagagtgctcttgcgtagcaactaacaataggggttgcgctcgttgcgggacttaacccaacatctcacgacacgagctgacgacaaccatgcaccacctgtctctactttccccgaagggcacctgatgtatctctacttcgttagtaggatgtcaagccctggtaaggttcttcgcgttgcttcgaattaaaccacataatccaccgcttgtgcgggcccccgtcaattcctttgagtttcaaccttgcgatcgtactccccaggtggaatacttattgcgttagctgcggcacgcagggggtcagtccccgcacacctagtattcatcgtttacagcgtggactaccagggtatctaatcctgtttgctccccacgctttcgcgcctcaccgtcagttgtcgtccagcaatccgccttcgccactggtgttcctcctaatatctacgcatttcaccgctacactaggaattccgattgcctctccgatactcaagaagagtagtttcaaatgcagttcacgagttgagcccgtggatttcacatctgacttgccctcccggctacacgccctttacacccagtaaatccggacaacgcttgccacctacgtattaccgcggctgctggcacgtagttagccgtggcttattcgtcaggtaccgtcttctactcgtccctgacaaaagaagtttacaacccgaaagccttcttccttcacgcggcgttgctgggtcaggcttgcgcccattgcccaatattccccactgctgcctcccgtaggagtctgggccgtatctcagtcccaatgtggccgttcaacctctcagtccggctactgatcgtcgccttggtgggccgttacctcaccaactagctaatcagacgcgaggccatctttcagcgataaatctttgacataagtgccatgcgacacctatgtgtcatgcggtattagcagtcgtttccaactgttgtccccctctgaaaggcaggttcctcacgcgttactcacccgtccgccactgtcctctgcttcaattggacgaatcctctttccacagattctcgttcgacttgcatgtgttaagcacgccgccagcgttcgtcctgagccaggatcaaactctctataaatcgtatctaaacgaccgtagccgcttaaatctttacagagctatttgtcatagcttaaaactttttatacttagctttaccggtaattgacttaacccggctccgccaagttttcagttgcacatcttacaatgtgctcccgtctggtgcttttcgtttcgttcgttgtttaatttacaaggtacacgtcccataaccgcggaacagtcattatcttagcacatgtctgccatcttgtcaactactattttaccttttttagacatttttcattgactcgctttacacgcgctctgccctcccggacagctttgttagactaccatacactgtgccttttgtcaacgccttttttccacttctataataatcgttctctcataagcggaatttatctctccgttacccacaagccacttgacatcctccacccgtcgtgctacaatcgttccacaatccaaggggcgctggcgcaagctggctgagatgtgacgtaacgccgtccggtccctcgaacctgatccgggtaatgccggcgtaggaatgcgatcatatcgattttcagatttccgcattgcgacgcctgcatggctcgccatgcgggaattttattttcggaggtacacattattatgaaaagtcacatgagagtccgcgccctgtgcgaaggcgctgtactggtggccgtggcgcagatcctcagctacctgaagctgtgggagatgccctggggcggcagcgtcgtcctgtccatgatccccctggtgctgtatgccgttcgctggggcctcggcgccggtctgctgggcggcttcgccttcggcgttctgcagttcatgtttgacggcggcttcgccattggctggcagtccatcgtcggcgactacctggtggccttcaccgtcctgggtctggccggtctggtggcccgccgcaagagcggcgtgttcaccggcactctgatcgccggcttttcccgcttcctggtgcactatgtggtgggcgccaccgtttgggcggaatacatgcccgagaccttcttcggcatgactatgcacagcccctggttctactccctgctgtacaatctggcgtacatgctccccaacatcgctatcacccttttggtctttgccgtggcgtacaagcccctgaagaagtacttcaccgcatccgacctgcttccttctcccgctgcggcccagccggtcaaggatcccacctctcccaaatgggatcctgagcgctgagcgctcccctctcccacggctgacgcagcaagccccacccgaatgggtggggctttttcatattggacagcagtaccgcctgcaaacgcaccaggcgggtgctctttaccgacctgcagcgaataccgtgttactctttcttatccaaatcgtgcagccgtatcgtcgaataacactttcgaagctgattgctgatttgcggcggcgtatttgccaccagcctttcataagtctttttgcaatactgcacacgcataaaactccttgacggcttcatccgattgatccggtgataatacattgcaggaattggggttttactgaaatacatccaaaactgcttcctgccgtccaataagccatagtcaacgccaatatggtgcatatcactgtagtaaaaggtcctgtgcgtaaacaatgcccaaaatactatccgatcttcacatatttcagcaacagcggcccactggtaacgcgtacaaaaaagcgtcaccagcagcgcaagatagataaccgcaacgagaagtgtcacttgcagcgcacctggaactcgcaggaatgctccgatggattcttgatgggaaatcagcataatcgcgtatgctgccgggatactgatcatcaacaataccgatagcataaaggtatgcggggctgcaacaagcctttctttcttcatcacgcacctcgatccaactctcattcctcagtatagaaaaaagccttacttccgacaccatgcaatggttcaaaagtaaggctccatggcagcgggagaaggattcgaaccctcacatacggagtcagagtccgctgtgctacctttacacaatcccgctgtgttccgacgaacaaaaactattatacaggttttcccttgtttgtcaacagttttttcgcgcactcctcccatttattttcacatctattttcccaaccactgccgcaggcgttcccacagctccacagcgcggaatttcaacacatatccgctgtccgcttctgtgataagctgcacatcgtcgccgtccagcccggcgcgcagcgccgtatcctccaactctgtgcaggaggccatgcacagcggtgggtacaccacacaccaccagttccggccggcaccctcgccgatgatgacgcgcagcgccatgtactctcccgccggcagggcgaagccgtcgtactccttccgtggaaactccgccatctccagcgccgcatgcaccgggtacgctccgccgcaggcatcataagccgtcctctccagctccggcagtgccgcgtttagatcctccatcgcctcctccctgttcgatgcctgacgcaggattgcctcggcgcgtgtcaacaccgcatcccgcgccagcagcttcatagtctggtcgtcttcgctgtccgaattggcaataacgtgcaggcggatcatcttttcctgcaagccgtcctgccggtgcagcgatgccgcgcccaccaacagcgttaccgccaacgctaacagcaccgcgatttcgataggtctccatttatttatatatgtatgcataaaaagcaccgtcctttgtagatttgcctacattttggacggtgcttcgtgtttttataccggtcgagccacaaatacccacggccatgtttttttcagcgccaccgctgccgcagcagccgcgctctgatcgtcgaacaggccaaacactgcgctgccgctgccgctgagcagcgtacccagcgcgccctgctcccgaagcgcgtccttgatggtcctcaggctgctgtccttcggcaccacccgctcaaagctgttgtgcagctccaccgccaccgcatggacattgttcgccgccaccgcgtcctgcatatagcggctgttccgcaccagcaccgaacccggctcatccagccgtcgatacatctctgccgtggaatagccctcatcgggcttcaccaccacgaaccaacccgcggctagctgcggcagcggcgaaacgacctctcccctgcccgtagccaactgcgtaccgccccggataaaaaacggcacatcgctgcccagccttgccgccagcgtttccagcctgccgtcgcttatatccggcgcgtacagtgtccgcagcgcccgcagcaccgccgccgcgtcgctgctgccgccgcccagtcccgcctgcacgggaatgtgtttctccaacgtgatcgtcacgccgtcgcttttcgtccccgtttcggcaaaaaacgctcgcgctgccttcatgcacagattgtcgtcgacattctccgtcaccggcacactgcaaagcagtgtgtcgcgccctgtaccgcgctccactgttacggtgtcccacagactgatgcgctgcataacagacattacagcatgatagccatccggacgtcggctgcccacctgaagcgtcaggttcaccttggcatatgctttttccatacacttcatagcggttcctcacaaaaaatagtgctgcggcattgccgcagcactattatagcacactgtacgcgaccgcgccagccttacttaacgatcttgcgggcctcgatgtagtagcgcttatcctgagcatgacccatagagaaggtcttacggggcagcacgccgtcggccatgacggtcttgaacagctgctccttgcccatggcgggcagtaggaatcccatattgccgggcttactgcccagctcacgggtcacgtcgtcaccgtggatatagtccacctcgccgccgttgtccttcaggtactggtcaataacgccctgtagcgtacccaccgccaactgcaccttggggtcgggcacagtgatgaagtggctctcgccgttccacacgaactcgatggtgtggccgtcgcccttgccctcataggcgttgggataggcggcgcggaaggcgtccatgaacttctggtgatccacgccgaacagcacccggtggatgggctcgaactgcagggcatcgtcgtggttattgaccacctccaccagtgcgtagcgggcgggaagcgccagatactcctcgggggtcttgcccttcttctgctcctcatagcaggccttggcagtagccagagaatggttgccgtcgcccacggcgaacagcaggggcgccacgccggagacgttgtactttttctgcatggcttcatcggtggtcaggccctccagagcattggccacagcatcgatctgcttatcggacagcttaaagccgcggatgtggccgccgtcctgcatcaggtcgaaatcatacaccttctccatcccctcggcagcggcagtcaggggctcaataacggtcttgtcaggatcgtcgatcagcagcatgacgtggggcagctcgatgggcgcgttgcggcgcaccttggcgcggggcgggatgcgatccagcacggtgccctcggtggcgcggatcagggcgccggagccgggggtgaaatcgtaagcgtccagatccaccataccgatcaggccgtggcggatcttgccgtcggactgctggcgctcaatataaatcaaggagtcagtcagcgtctcaaacacaccgtccgccagatacttcttcatggcgttattgatattctcaatgtactcgtccacgttgggtgccttcagattggcttccggcaggatcaggcgcagggtggagggcgcatcgcccactttttcctccactgcctgccagtactccggctcagaggtgaactggtcgcaggcgacgaccgcccacttgttcatgtcctggcccttgggcagcaggatatccgcaggataaaaacccagcttgtcaaacttcttgttcatggtctcctccttttgtatatgtacatggtcgtgtacagattgttctatactaataataccaaattaacgctgcttttgcaatcgcttttccaaatttattcaggcaaactgaaaatttttttgtgtatatacgatgttgccagggaaatgctatacaaagcagtagtcttttcagaatggaggtctttgttatatgaaggttctggatcgcgtggcgctggcgctggtcatcatcggcgcgctgaactggggcgccgtggggctgttccgcttcgactgcgtggcagccattttcggcggccagtccgtggccatcagccgtgttatctacgcactggtgggacttgccggcctgtggtgcatcaccattctgttccgcgatgcacccgccgaagcgtgagaataacgaaaagaccgccgaaaggcggtctttttcagagttttcgactcatttcattttctcttccgcgcttgcgctccctctttctgcgccgcgcttcatagccatcgctggctgcggcaaacaccctctcatacggctccggcagccactcactcatatagcggcaaagcttctcaccggccgggaatttaataaatccctttttgttgcgcagcagatagctcttgttccggcacgcctgcggataagactttgtggaaaaatacgccatatctacaggcgtaaccgcttttcgcgccgaacccggccagcggtagtcgatgccggtatatcgaatatccgtctttctcagccgcactgtccgcataaagggacacttccaaacgatctcgtcctccgtgaccacaaggcacccaaagcatctgtaccagaactgacgaagcagtgcgtagtacaacgacacctctaccagcaggagaaaaggtatctcccaccatgccagcatcattccggccattctgtcccgcacaaagagatacgggagccacaccataacagccagtaccgccaacatgagaaaacgcccctcggtcagtaggatgatgtgctcgtgaaacacttttcgctttacaatatccgctttttccgcctggcgtttcatggtgccgcctttccatcaacctgataaagcctttttgctgacagtcaaagcataccgccgttatagcggcgctggacgcgccaaagaatggcgaatgacgccgcaagaccgacgaacagcaccaccagcgaagcggtgaccgcgccgggaagtgtccacagaagagagacaatcccactaagtaccagtgttcccgcaagggcgaaaagtccggtggaaaaggcccggccataggctgccatatcctccgatctgactctctccctgtgatattcatggatcaaccccgtttttccgtggtagatcaggagtccgagcagtagaaaaagggctgcgatggcccacataagaacagcataggctatcatagacgtatcctccacaatttgttgcataacttctacatattttgtgctctattttaccaataaatgttttactaattcctcgttcgggtcagctaaaacggtctgataattggtataaactaccattccgggcttggcggcggcgggcttctttacgaactttacctgggtgaagtcaacgggtacttttgtgctgctttgcgcctgggaaaaataggcggccagagaggcggcctccgcgatgctctgtgcatcgggtcgtccgccaccggtggacagtatgacatgggagccgtggatcttctgggtgtggaaccacaggtcccacttctccgccgtcctggtggtcaggcggtcgttctgccggttgctgcggcccacaaaaatcggcaatccggcggaggaacggaactcccggggcttgctggggcgctggaagggctgctttttcccacccttggcgcgaagatagccgccgtcggtcagttcggcgcggatgtcattgaaatcctgctcggactcggcctgcgccagctcctgcagaacactctccaggtactccagttcagcaccggctctggtcagctgctccgtgaggtatttttccgcggtcttggcttttgtatattttttgaagtatttagcggcattttcctggggtgaaaggcggacatccaacggaatatctatgtctttgcacgccggatcatagtagttctgcgccgtgaggcggctcatgccgcgctccatccgatacagatttgccgtgatcaattcgccgtaaatgcgccacttatcccgatctttgctgtccaaaagctccttttcctgcatggtgatcttgcggcgcagacgagcggcggcgttattggccgttttcagcaggtcctgccccttctgcttgacacggtccgcctgctcgcgcttggcgtagaagttatccaacagggcggaaaagctgccgtactcctctgccgctgccgcgctgccgtactgacaaacaggcagataggtgaagtccataggcgcgccggagcgtttcagcataacgggtgtaaagttgttagcattcacagtgtcgcgccatacggagaacgcggcccaaagtgtctcggctgtccgcggcgcaggggcatccacggcaccgcaggcacgaaacgcgatctcacgggccaccagcggtgagataccgttgaaggtgtccaccagccacttgtccgcaggcatatcctctcctgccacggcggcaagacgggaaaacacccacctctctactgtaaagggttcaaccttgtctggtgctgcgggcaaacgataaaacaggcccggaagcacctgacggtccgggttcatctcgaagtcgatgcggcgcaggcagtccaggatacggccgtccttatcggctaaaatgaggttggcgcggcggggaaacgcctctaaaatgagggaaaaacgggtgcggtcgcccaactcgtcggcggcggaaatgtgtatgtttaccacacgttccagcggtatttgttcaattttttcaataattccgcctgacagatactttcgcaaaagcatacagaacatggggggctgggcgggattgtcccgaagctgctccgtcaggtgcaggcggggttgtccgccaccggcggacagcagcaggcggcggctgccgcggagcagcagcaccacctggtcgcgagcaggctgctgtattttctcgatacggctgccggcgacaaggggcgaaagctccgccaccacagcttgcaggcatacggcatccaggggcatatcaggtctcctccatcatggcgcggaacagctcctccgcgcggtttttatcaccttttaagtataaatagcccattaaacactccaaaccggtggcggaatggtactgggccggggtggcgctgcgggacatggtgtggacgttggcgttgcggccgcgcttgtagaccgcctgctcctcgtccgtgagcagcgggagcaccttctgcattttttccgcctgggcgggggcgcagaccagggcgatggtggcgcggtgcagatccttgcctgtcgctgtaccgtggacacaaagccaggtgcggaccagcgtttcatagaccgcatcacccatatgggccagggcgatggcgctcattttacgcagctcatcagaggatagttttggggcaaaatagttcaaaatgttccacttcctttaccccctcagtatgacacatttggtttgttttggcaagaaaaagtgtcgacaagcgggcacgtatatgatacaatttaggcagcgatgctttacgtttatgttcccttttttgtactttgttgataccttatcacattttctgcgcgaggcgcacgccaagctgcgtcaacaggtgcatttcaggaggttttttatgccgcatacggaaaaacgctataagaagggcgagatcatctgccggcccaaggagatggtgatgagtatgtacaacatcctctacggcagcgtgggggtgtacttcgactatgggacgccggagcaggtggaggtagtgaccttgcgggagggcgacttcttcaacgtcatcagctttttggagtcgcggccccggaacaccacggcggtggcgctggagaacaccatcgtcagcgagatcacctatgacaacttcagcgcgtacttccgggagaagccggcgaagatcatgagccttttgcagcacatgagcgcgcggatgcggcagatgcagaaggcctatgtggacacctgccacgcgctggaggtgtacggcgacaaggcaaagctggcggcggagcacggcgagtggaccgacagccacaaccggacgtacaacctgctgaaggccatgttcccgtccgtataccacgaagaagagaaatagatacgcatcccccggcttttggccgggggatattttttaccgttatcctatttgcagatacgggttgtggaaactggaaaatccggtatactgagagagagagaggatacgaggcgcgcgcttcggcgcgcacgggagagaaaggagcaaacggatgaagagacgatttctggcgctggtactggcaggctgtctggctgcggtgctgagcaccgcagcgtgggcgatgtcgcccacgggcttttatcttaatgtggaactgccaagcggcaagacgatcgcgcttgatgtggagtctggggacagcatcgacaacgtaaaagaagaattggagatgaaaaccaaaatcgctgctggggagcagcatctctattacggcggaaaattgttagtagatggccgcacattagcaaactacaacattcaaaagggcagcacgctgctgctgacgacaaaaatcaagggtacacccgccggagaaaagctgacagaagaaaatatgtcgggcagcacaataggtgcgccggtcacgatcagcgaaaagacgctgaatagcggcacgtactatctgtgcaacaatgtgaagctgacgcaggcgctggtcattcagggggatgtgacgctggacctgaacggatttgtgctgcaacatgaaaacagagacgcaaacgacagcgttatccagatggacagcggcacgctgacgctggtggacagtaaccccgacgccatacacaaattcgtcaaggaggccaccggcctttggacgctgaacgaaaacgcgggcaccgagatcgttaagggcggggtcatcaccggcgggatcggccgcgaacattctttcagtagtgtgtatggcagcattagtgagaacggcggcggcggtgtgtttatcaatcaggacgccagcttcgtgatggagggcggcaacatcgtgggctgctctgcggttggcgaacacaacaccgcgggaggcgtactcgtggcacgaagcgccagctttgtgatgaaggccggaaaaatcgcaggctgcaccgcagcgcggggcggcggcgtgtacgtggctgaccgtgacggagactatgcgcttggcagctttaccatgaacggcggcaccatcgagtggtgcgtggcttacggcagcgctgcatatgatgacggaggcggcgtaaacaacttgggcagctttaccatgaacggcggcaccatccgtaactgcaccgccgcttatggatatggcggcggcatatccagccttcgcaacatcaccatatgcggggacgcgttcgtgagagactgtacggccagtcaggataaatcctccgcaatgtacttaaatccaagcaatcctgctgaccgtgctgtgatcgagggcgggaccttccgcggcaacatttatgcctcaccctattgcactgggatggtcgccgtcaccggcgggacatttgatcccggacagccaaacggcataacgctgcacaccgtaacgttcaacagtaacggcggaagcgacgtaccgggacagatacgggccaacgcggcggccaccaagcccgccgatccgacccgcagtgggtatgtcttcgcgggctggtacacaaacgaggcgtgcaccgcggcctacgactttacccagcccgtgacgaacagcgtcaccctgtacgccaagtgggaggcggcgccccggtactactacaacagcggcaccaccgagaccggtaagaccgacgagaacaagaagggctcccccaagaccttcgacccgggcgtgggcatctacgccgtgagcgtggcactgtcgctgacgggaacggcatggatcggccggaaacggcattgagcaaaaaaagaaagcccttgcgggctttctttttttgcgtattctcagatgtgcatacagacgtcccaggcaccccagatgacgttgcggaggttgccccacttctcgcaggtgccgacacggtagaccttgtggtcatcggcggcgatgggcgcgggcacgaagccgatgccgttgaccacactgtcgcactcgatgcggatctcggtgccgtcctgctgcttgaccatgacgaagccgtcgccgatctcggtgatggtggcgttcaggtagacggggaccttcttgaacgccagcatctcgcggaggaaggaggcgttggccaagcaggtgccgggggtggcgatcaggtcgtcggcgtactccacgatgatggggtgcttaccctggaggaccatctcataggcggcctcgcaggaggactggccgccgccgaagaagacgatgcggtcgccggcgtccacctggttcaacagcagctgggtgaagttgatggtcttgttgaagcccttgaccggcagggtcttggggtgggagccggtgcagacgatgatctcgtcgaactcgcggcgcagggtggcgggggcgttgatctccatgttgaagcgaacctcgatgtcgttcttcttcagctcacgctcgtaccagcgcagcagggccttgtcggcctccttgaagctcatggcggaggcggtgatgtacaggccgcccagctcgctggtcttttcgaagatgacgggggtgtggccgcgctgcttgagcaccagggcacactccatgccgccgataccgccgccgataatggcgaccttcttgggcttgcgggtgggaacgatcttgtacttgttgtgctgcatggtgctgggggtcagggcgcagcgggccaggtgcagagagtcgtccatgggctgcatattgggcgtgctcttggacttgttgaagctaaagcaggcgttgtgacagttgatgcagggcttgatgtcctctacgcggtcctccaggatcttgttgacccactcggggtccaccaggttctggcgggcgatgcccacggcgtccagacgtccggcggcgatctcctcggcggccttggcggggtccatcttaccggcgcagaccacgggcttggaggtgaagttcttgatgtgttccacctcggagaggttgcagttctcgggcatatagaccgggggatgggcccagtaccaggcatcgtaggtgccgttgtcgcagtcgaacatatcgtagccggcatcctccaggtacttgatggccttctcggactcggccatatcgcggccgaactccacgaactcctcgccgggaacggcgccctggccgaagcccttggtcttggacaccacggagtaacgcagggccacggggaagtccttgccgcagacggccttgatggcctggacgatctccacagcgaagcggtagcggttttcgaaggagccgccgtactcgtcggtacggtagttcatgttggcaatggtgaactggtccagcagatagccctcatgcaccgcgtggatctcaacaccgtcaacgccggcatcctgcaggagcttggcggtcttggcaaaggcgtccaccatctcgtggatctcctccacggtcagagggcgggacttgcactcgggataccagcggttgggggtggcggaggcggaggcggtgatgtagtccacgttcaggaagggcttgcccacggcgccgaaggccttgttctggagcatcttgaccatgatctcgttgatagccatggaacggcccataccggcggacagctggacaaacagcttggagccggtcttgtggaactccggcagccactcggccagatccttgaacatctttttgttctggtacagccagcggccgcccatggtgtcgcggacacactgcatacccggcagcaccaggcccacgttgttctgggcgcggttcaggatgtggtaggccgcttccttgtcgaagtgacagggctccagccagccgaacagggacgtaccgcccatagagggctgcacgatacggttcttgatctccacgttgccgatcttccagggggtaaacagagcgctgtatttctcgttcattcggtgttcctcctcatattttcagcatactgccggatttcgcttccttattatagcggatttttgggcgaagtacaacagcgaaattggaataagtgtcgtttttctggcaaatccgggaaaataaccgggaaaaagcggcagggacctccctgccgctttcggtttattcggtttcaggggcaccgccctgctcccgggcgtattcctccagggcctgggccaggaccttcttgtcgtggcggctgtggacctgggtcaggtcgaaccgcgcccacatatccgggcggcgggccatggtgcgcttgtagctctccttcgtgcgccagtcagccacattgccgtgatggccgctgagcaggacctcgggcaccctgcggccgtgccattcctccgggcgggagtactggggatactccaaaaggccgttccagtggctctcgtcggtgtagcagctctcctccggcaggacgccggggaccatgcggcacaggcagtccgccagagccatggcgggtatctcaccgccggtgaggacaaagtcgcctgtggatatctcctcgtccacgcactcgtccaggaagcgctgatccacgccctcgtagtggccgcagaccaggataagatggtcatactgtgccttcagttcacgggccacctgctgggtcagcacccggccgcagggggacatatagatggtgtggaccctctcccccgcttcatcgcagatatgctgccagcagcggtacagaggatctgcctgcatgaccgcgccgcggccgccgccgtagggatagtcatccacctgcatctgcttgttggtggtgtagtcccgtatctggtgggtctgtatggtgacaaagccccgttcccgggcacgaccgatgatggacgaacccatcatcgcttccaccgcgtcggggaacagggtcatgatgtcaattctcatcggtggccagtcctttcatcatgtgtacgcgaatgattccggcatctgggtccgcggaagcgataaagacctccggcacggcggggatcaggtactcgtgggcaccgccacggacctggtagaccttgtgggcgggatagtggagcaccttgtccagcttgcccagttcttcgccggtggcatcgtccagaacggtacagccctccagctcggcatcgaagtactggcccttgggcagcttggcgtcggtgcggcggatggagaccgttttgcccttcagcgccagggcatcgtccatagtggcgacgccgggcaaggccagcaggacggtggatttatggacccgggcggagatgaccttcacgggctgaccgccgatatagagggtcttgaacgaggcgatgaactccgggtcgaagccggcggggttcaccttgacctcgccgcggataccgtgggcgttgacaacagcgccgacgggaatgaaatcgggacgcatgggggtcctcctccctggcagaacatatctttcagctggacagcgtgaaatgcagctggaagcgcagcatatagtacagcgccgctgcgcccacggagaagatcagtcccagcagcgcgcgggtacggccccgacgctggaagcgcacggcagccaccacgacgcagaccgcgtcagacacaaagggcagccacagcagaatggtcatgggccagaaggccagccagggattatagttggccgcagtgatggcgcccaccaacagcgaggccaggtcgtagataaagaacggaacgatcaggttgatgatgccgtggatcagggaacgggtatcgccacgcatagccggccctcctttcgacagaataacgtatttgagtcagtataccatattatgcatatccgcgcaatgggatatttcatactgtgccgtgctttaacggccagagatggtgcttctgacaacttcgcagcataccggcactatatttagtgtgtttgcgcggtgtacaaatcactatatcttgtgtaactttgacaaagtgcacaaaaatagggtgtactttttggcaggttattttcctatattttgttttttgctcttgaaacagcacaagatgtagtgtattatatcaacacacgcatcgctgcgggtgcaggcttagagctgtgtgccgccgggacggcagggagagatagatgagataggaggacgtaccatgaagatcatcaagagaaacggcgccgaggtgggctttgacatcaccaagatcattatcgccatcaccaaggccaacgagtccgtggaggaagtagatcggatgacgccggtgcagatccagcgcatcgcagagtccgtggacctgcagtgtcagaagatgaaccgcgcacctaccgtggaggagatacaggatatggtggagcactatatcatggcccacggcgctttcgaggtggccaagcactatatcacctaccgctacacccgttctctggtgcgtaagtccaataccaccgacgacaagatcctcagcctcatcgagtgcaacaacgaagaggccaagcaggagaactccaacaagaacccggtggtgaactccacccagcgggactatatggccggcgaagtcagccgggacatcaccaaccgcattctgctgcccaaggacatcgtggaggcccacaatgagggcatcatccacttccatgacacggattattacgcccagcatatgcacaactgcgacctggtcaacctggaggatatgctgcagaacggcaccgtcatcaccggaacgctgatcgagaagccccacagcttcgccaccgcctgcaacatcgccacccagatcgtggcgcaggtagccagcaaccagtacggcggacagtccatctctctgactcatctggcacccttcgtgcagatcagccgggaaaagatccgcgccagcgtgcgggacgagttcgacgccgtgggcgtggctgtcaccgaggacaagatcaactccatcgcggaaaagcggctgcgggaggagatccgccgcggcgtgcagaccatacagtatcaggtggtcacgctgctgaccaccaacggacaggcccccttcgtgacggtgttcatgtatctgggcgaggccaagaaccagcaggaaaaggacgatctggccctgatcattgaggagacgctgctgcagcggtaccagggcgtgaagaatgaaaagggcgtgtgggtcacgcctgcgttccccaagctcatctatgtgctggaggaggacaacatccgcgagggcagcaaatactgggagctgacaaagctggccgccaagtgcaccgccaagcggatggtcccggactatatcagcgagaagaagatgctggagctgaaggtggacaagaacggcaacggccactgctatccctgtatgggctgccgcagcttcctgaccccctatgtggacgagaatgggaaccccaagtactacgggcggttcaatcagggcgtcgtgaccgtaaacctgccggacatcgccctgagctccggcgggaatatcgagaaattctggcgcatcttcgacgagcgcatggagctgtgtcaccgggcgctgctgtgccgccacgagcgcctgaagggtacgctgtccgacgcggcgcccatcctgtggcagtacggcgcctgcgcgcggctgaagaagggcgagcccatcgacaagctgctgtacggcgggtactccaccatctccctgggctacgcgggactgtatgagtgcgtgaagtacatgaccggcaagagccacaccgaccccagcgccacgcccttcgcactggagatcatgcacaagctgaacgccgcctgcaagacctggaaggcgcagcacaacatcgatttctccctgtacggcacaccgctggagtccaccacctataagttcgccaagtgtctgcagaagcgctttggcgtcatcgagggcatcacggacaaggggtatatcaccaacagctatcacgtacacgtcaccgagccgatcgacgcgttcaagaagctggagtttgaggcacagttccagcacctgtcccccggcggagccatcagctacgtggaggtgccggatatgcagaacaatctggacgcggtgctggaggtgatgaagttcatctacgatcacatcatctacgcagagctgaacaccaagagcgactactgccaggtgtgcggctgggacggcgagatcgaggtggtcgaggaggacggcaagctgatctggaaatgcccccagtgcggcaacacggatcaggacaagatgaacgtggcccggcggacctgcggctacatcggcacacagttctggaatcaggggcggacccaggagatcaaggaccgcgtactgcacctgtaattctcttcaaacgcggggcgggcttatgcccgcccctgtttttcaccttgctttttccccctttatttttcagctctattttaatattattttaacctttgtggtctatactcagggtcaggaggtcgttccatgcattacggagaattgaagaaatgtgatattgccaacggtatcggcgtgcgggtgacgctgttcgtatccggctgcaccaaccgctgcccggactgctttcagccccagacgtgggattttgactacggaaaggaattcacggaggacaccaaggcggagatattcgcggagctggacaagccctttgtaaacggactgacggtgctgggcggcgagcccttcgagccgcggaaccagcgggagctgctgccgctgctgcgggaggtcaaggcgaagtatccgggcaagaccatatggtgctttaccgggttccggctggacgatgagctgctggcagacggcagctatccccggtgcgaggcaacggatgagatgctcgcgtgcatcgacgtgctggtggacggacggtttatgaaggaactgaaggatatctcgctgcagttccggggcagccggaaccagcgggtcatcgatatgaaccgaacaagggagacgggcaccgtcaccctctgggataagctaagacgataagagcgagacgcaggaggtacggtatgaaaaagtattgggtgccggggctggcggctctgctgtgcgccatggcggtgctggccgggtgcggtcagacccagaacagcgggcaggacggcgcgacggatgcgggctacaacgccgggaacggtgacgtggtgcagctgaacggttttcgcgccatcgacattgaatgggtcagcggacaggtgaatgtggagctgtacgacggtgagggcatacagctgtcggagacgatgatggacggcagcgatgcggcactgaagatggaatggcaggtaaacgaggacaagggcacgctggacatacgctcccagccccagctgatgagcgcaacggaggagaagcgtctggtggtgaggctgccccgaagccttgtgctgcacgagctggacatcaagacggtcagtgccggggtatcggtggatctgacggacgaggacacgctgacgcttcaggagcttgacgtcaccagcgtcagcggtgagatcagtgtctatgcggccaacgccggggagatatccctgtccaccaccagcggaagcatcagcggaagcgtccgcacccaaaagctggaggcggacagcggcagcggcagcattgacctggcgctggacatcatgccgacagaactggaagcagaaaccagcagcgggagcatcgtcatgcagctgtgcgatctcagcacgctgccctctcccctgccggtagaatttaagaccaccagcggcaagctcagcagcgacgtgaccttcactacggtggaggacgccgcgtgggaattccagacggtcagtggaaacgtggagctgctgacggtacggtaaaagcgcgcgaaaaatgaccgcccttacgggcggtcattttttgcacttgtcagcggaccagctcgcccacggtggggccattggcagcctgggactcgtcggtgtcgatgtgcatagtggtagcaccgcccacattgacgcggacaactacatcgtcgaagatcagcttgcggccttcgccgccgcaggcgaccttgatgatctcgccgttcttgatgcccatggcggcggcatcctcctcggtgacgtgcagatggcgcttcgccacgatgacgccctcggacagctccacctcaccggcgggcccgatcagcttacaggcgccggagcccttcacgtcgccgctttcgcggatgggggcgtcgatgcccagggtgcgggcgtccgtggcggaaacctccacctggtccgccttacgggtggggcccaggatggacacattggccatctccttcttggggccgacgatggtcaggcgctcgttgcaggcgtactggccgggataggacaggggcttgcggatggtcagctgatagcctgcgccgaacagcttttccacagtctcctgggtcaggtggatgtgacgtgcggacgtctcgatcataaagctcatagtgatactctcctttgtgtggtttttgcgtttatttctttttgagtgggtacagatctttttcggagatgcgttccagcgtctccacttcgccgacgcagaagtagtttttgctctcagccaccagggtaccggtcaggcggacacagtcgccccggcgcataagcttcgcctcgtccagcagctctgcgctgcccgaaagacggacggtaaggccgaagccggtgtcgatctccccggcgctgttcagataccaccaggggaagcgcagctccaccgcgcggccggcatagcggccctgggcgccgcggagatactcggtcttcacctgctcaaaggtgcgggggacgagttctccgtccggcatggggaaatagagcgtgccgtacaagcggccgaagcgcttgatgcgctgaccgtgacgactgaccatcaggaacaggaccacgacggccagcagggcaccgtacataccgtggccctcgatcaggctccaggcaaagacggcgacggcaatgaggagcagcacacggttcatgtcatcctgtccgccccagatatctttcagtcggttcataagcgccctccttttctcaacagcactcatcttaccacaccgcggcggcgtatgcaagggaaattgccatgcgcggtacaatttcctcttgtattcggcaaaaaatctgctataatcaaaacaacgattttttgcggtgctatcaccgaaactaataggaggcggtttttatgtccgtaaagctggagctgtaccgggtttttaaggaggtcgccgaggtgggcaacatcacggccgcggcacaggcactgtatatctcccagtcggcggtgagccagtccatcaagcagctggagcgcgacctgcagacccgtctgttcgcgcggaacagccgtggcgtgacgctgaccgccgaggggcagatgctgtatgagtacgtccgcagcgccatgggcctgctggagacgggcgaggaaaagctgagccagacccgggaattgcagatgggacagctgaccatcggcgccagcgacaccgtgaccagccagttcctgctgccgtatctggacacgttccacaagcggcacccggccatccacatccagatcgtgtccggacgaagccacaaggtgctggggctgctgcgctccggcaaggtggacatcgccttcgccagcacgccggcggacgatgccggactacggatatatccctgcttcgatacccacgccatctttgtggcgggggcggagtatccctgcgacttccggcacgtatacacgctggaggagatcgcggcgttcccgctgatcctgctggagcgcaaggcctccagccgtttgtatctggaacggttctttttgcagaatgggctgaagctgaacccggagatcgagctgggcgcccggagcctgctggtggacctggcggccatcggcttcggtgtggccggcgtgacggaggagttcgtccggaaggagctggacagcggacggttgaaaaagctgaagacctcctttgagataccggcccgcagcgtggatatgtgcctgctgagcgatgtgccccagtccgctgccgcggagcggttcacggactttgtcaaggacagcttatccaagctatgagcagggcttttcgctccggtaaaacccacaaaaaacagcaaaacacgcctaaatagttctccgtttttccctgtcgcttttccctgcgaaatcaggtatagtaggtgtactatatctcacgagaggaagtggtggtcatgcagcagctgaaggagcgtatcctgcgggagggccgcgtcctgcccggtaacatcatcaaggtggacggttttttgaaccatcgcgtcgacacggcgctgatgcgggatctggcggacgagtttgccaagtattttgacgtaaaaaatatcacgatggtgcttacggcagaggccagcggtattgcgctggcgacgatctgcgccgaacggtatggtgtacccatggtctttgccaagaaggccaagagcgacaacatcgagggcggtctgtaccagagtgatattttttcttacacctacaagaaaaaggtcacactgctggtgagccaggactggatcaccaaggacgacaaggttctcatcattgacgacttcatggccaagggctacgccatgcgcggcctgatcgacatcgtgaacaaggccggcgcgcagctggcgggcatcggcgtggcggtggagaagggctttcaggacggcggcgacagcctgcgccgggagggctatcccatcaaatccctggccgttatcgacagcgccgagaacggcgtgatccgcttccgggaggacgactgacatgaaaaaggtgctggttctggatttcggcgggcagtataacctgctggtggcacggcgtgtccgtgagtgcggcgtatactgcgagatcaagtcctatcggctgagcatggcagatatccgcgcctttgggccagatgcgctgatcctcaccggcggccccgccaccgtgttcgagcccaacgcccccatggtggacagagcgctgtttgaaatgggcatccccgtgctgggcatctgctacgggcagcagctgatgatgcagctgctgggcggtcagtgccgcaaggcggagacgcgggagtatggcaagatacagctgacccacacggcctcccctctgtttgccggtgtgccggagacgtccgtgtgctggatgagccacggcgtggaggtggagcgtatcgccccgggctttaaggtcatcgcgaccaccgacggctgcggcttcgccgctgtggaaaactcggatcggaagctgtatggcgtgcagttccacccggaggtgcagcacacggagtacggtatgcaggtgctggaaaacttcctgtacaaggtatgcggcttcagcgccgagtggaccatggcgtcctatctggacgaggccgtagcggaatgccggcggcagatcggcagcggtcgggtactgctggcgctgtccggcggcgtggacagttcggtggcggcagcgcttttgcagcgggcggttggcgatcagctgacgtgcattttcgtggaccacggactgctgcgaaaagacgagggcgaccaggtggagcaggtgatgaagcatcagttccatgtggatgtgcgccgcgtcaacgcgggaccgcgcttcctgagcaagctggctggcgttaccgagccggagcacaagcggaagatcatcggcgaggaattcatccgggtctttgaggaagaagccaagaaaatcggcgcggtggacttcttggctcagggtaccatctatcccgatgtggtggagtccggcctgggcggagagagcgtggtcatcaagagccaccataacgtgggcggcctgccggactgcgtggatttcaaggagatcgtggagccgctgcggcggctgttcaaggatgaggtgcggaagctgggcaccgagctgggactgccggacgagctggtgtggcgacagcccttccctggtcccggtctggccatccgcgttatcggcgatatcaccgaggaaaagctgaccattctgcgggaggcggacgccatcttccgggaggagatgaagctggccggtctggaccgcaccaccagccagttcttcgcagtgctgaccgatctgcggagcgtgggcgtcatgggcgacgagcgcacctacgactacacgctggcactgcgggccgtgcagagccaggactttatgacagccacctggtcccgcctgccctatgagctgctggacaaggtctccggccggatcgtgggtgaggtgaagcacatcaacagaatttgctatgacatcacctccaagccgccggcaacggtggagtgggaatgatacgaccccaaaggtggccaaaaactacaaatacgccaaaacctccggcttcgccggaggttttggttgtaccacgacaaaagttgtggtatgctgatgaaaaacagcggaggaacacacctatgcgtctgatctcatggaatgtgaacgggctgcgggcctgtctgaataaaggtttcctggccttctgcgcccttgcggacgcggatgtcatctgtctgcaggagacgaagatgcggccggagcaggcgcagtttgagctggagggctatcaccgattctggaacagcgccgacaaggccggatattccggcacggctgttttcacccgacgggagccgctggcggtgacatacgactttggcgaggatatccaccggcatgagggacgggtcatcacggcggagtacgaggatttctttctggtgtgctgctacacacccaattccaaggaccagctggcacggctggactaccggatggcgtgggaggacgacctgcgggaatacctcttggaactggacgccaaaaagccggtggtgtactgcggggacctgaacgtggcccatcaggagatcgacctgaaaaatccccagtctaatcggatgaacccaggcttctccgacgaggaacgggacaaaatgacgcagctgctgagcagcgggttcgtggacacgttccgggcgctgtatccaaagcggaccggggcgtactcctggtggagctaccgctttcacgcacgggagaacaacgcggggtggcgtattgactactttatcgtgtcagcacggctgatgccccgggtgaagaatgcggatatctggccggaaatcaccggcagcgaccactgtccggtggtgttggagctgacggagtagggcattatctgtagcgagcaaaaaagaccgcctttcggcggtctttttcgtataacgacattttttaaccctcgctgctggtgtcggcaggatttttaacggggatcagttcgcccatgaggacgtagcgggcattatcaaaatcgtagtcgcaggtgctcagggtcaggatgctgcccgtgggcacaccggagccggacttgaaggtggactcgttgatacactgctggagatagctgtcgctgagagaggtggcatacacatcggcgtcatgatccacaatacaaccggcaaacaggttgaccttgtaggtctggttgggggtgtacagatagaagtagggatgcgcctcgtaatagctctggctcttgtagttcatcagggacgcgaacatcatgccggtcttcatattgtggccgtagatgaggttgttctgagaggtgaagtcagagttacagcggatatccaggaagacggtgccgttcttgttgtccttgccgtcgatatcgcggtacagatagtactcgccgccctcgtccgcggactgcacgatgggcagctgcagcgtcgtattggcgctatacacatagcccaccacgtcggggtacttggcctgcatggcggtgaagtccaccttgatgctctcttcatccttcttgacaggcttcttcgtctcctggctgtcaccgtcggtgctgtcgccgtcggtatcggtatcgccggcggtatcgtccggactgatgaagtcctgattgatattgtcgttgatcctctcggtgtccttctgttccttcagatacgaaatgatcttgacggacgagaacaccagcacgcccaccaggatcaccaaaacggcgtaatacagggcttttccgttctttctgccgccgcggctccttctgctgcggtgacgactgccggtacgctcggccggctgctcttgctgcacacgggatcttctcttgggtgcatcgttcatgggtacacgcctccttatcgttgggtattgtaacaggttttttcgttcagtgcaagggatatagacaagatgtaatgaaattgtaacagtttctctttacttctgagaaaccagggattacaatagaaatgttggctgccgtatagacggcggagccgccggctccgttccatcaaaaagataaaggagaaccacaatgatctatttcaacagtgattatctggagggcgcgcacccctctatcatggtcaggctggccgagacgaacatggtacagaccgtgggctacggcgaggacgaatactgtgaggcggcgcgtgagaagatcaagaccgcctgccaggccccggaggccgacgtgcattttctggtgggcggcacccagaccaacaccaccgtcatcgccgccatcctgcggccctggcagggcgtgatttccgccgtcagcggtcacatcaactgccatgaggccggtgccatcgagtccacgggccataaggtcatcaccctgcccaccaccaacggcaagatcactgcgcagcaggtgcaggactatgtggagtggcacagaaacgatgagtccacggagcacatcgtccagcccggtatggtgtacatctcccaccccactgagggcggcacgctgtataccaaggcggagctgacggcgctgtatgacacctgccgccggtacggcctgccgctgttcattgacggcgcacggctgggctatggcctgatggcagaggagagcgacatgacgctgccagagatcgcgcggctgtgcgatgtgttctacatcggtggcaccaaggtgggcgccctgttcggcgaagccgttgtcatcatgaacgaaaatctgaaaaaggatttccgctttattatgaagcagcggggcggccgcatggccaagggccggctgctgggcgttcagttcgacacgctgttcaccgacgacctgtatttcaagatctcccgccacgccattgagatggctcatcagatccgggacattttcgtctccgcgggctatcccctgctgttcgactcccccaccaaccagcagtatcccatcatgtcggatgacgagctggccattctgggcaaaagcttcggctatgagtactgggagcgtgtggacgagacgcactccggcgtgcgcttctgcgctagctgggccacaaagcaggagcacgtggacgccctgcgggcggctgtgaacgcgctgaagaagtaagcgttcctctgctgtgagataagcatagcgcaggtagctgaaatgcaccttaaagttacttaaaaaaattccccgacgatgtcggggaatttttttagcaaagcaaaggcaccctcgcagggtgcctttgtcgatagcgtacttacgccttggggccggcagccacgacctcgtcgctcatgtgggtgtacttcttgaagttctccacaaagctggaggccagcttcttgcagctcgcctgataggccgccttgtcctcccaggtgttctcggggatcagcagctcactgggcacgccctcgatactggtaggcacctgcacgccgaaggtaggatcggtgacgaacacactcttctcgatctcaccggtgagggcggcggtgaccatagcgcgggtgtagctgagcttcatgcgcttgccggtaccgttccagccggtgttgaccagataaaccttcgcgccggccttctccaccttgtcggccagcatggcggcatagacagagggatccaggggcaggaagggctcgccgaagcaggtggagaaggtaggcacaggctcggtgacgccgatctccgtgccggctaccttggaggtgaagccggagacgaagtagtacatggcctggttcttatccagcttgctgatggggggcaacacaccgtaggcatcggcggtcaggaagatgaccgtcttgggaacgctagggctcatgccggacagctcggcgttggggatatactccacgggatagcccacgcgggagttgacggccagggagtcgtcgtcgaagtcgaactcgcgggtgtcgggatccatgaccacgttctctaccagcgcgccgaacttgatggcattgtagatctccggctcaccctcggggctcaggttgatgcacttggcgtagcagccgccctcgaagttgaagacggagtcgtccgcccaaccgtgctcgtcatcgccgatgagcatacggttgggatcggcggacagcgtggtcttgccggtgccggacaggccgaagaacacggcgctgtcgccgttcttgccgatgttggcggagcagtgcatggggaacacgccctgcttgggcagcacatagttcatcacggagaagacggacttcttgatctcgccggcgtactgggtgccgcagatcaccacctcgtgggcctcgtagtccaccagaatggcggcctcgctgcgggtgccgtcgatctcggggatgcacttgaagccgggggcggcgatgatggtatagtcctccttaaaatccttcagctgctcggccgtggggcggcgcaggagctggtggataaagagattctggctggccagctcgttgacgatgcggaaggccttggtgtacttgggatcggcgccggcaaagccgtcaaagataaagatctccttgccctgcagataggcgatgaccttggcgcggatggcatcgaacttggccttctcgataggacggttcaccttgccccaggcgatgtcgtcatggacggcaggggtgtccacgataaacttgtcattggcactgcggccggtgtatttcccggtcttgaccaccagggcgccggtgttggacagcgtaccctcgccgcggcaaagcgcgtgctcggtcagctgtgcgggggtcagattacgatagaccgccttggcgttgatgatacccagcttttccagtccgtaagtttccatttgcaaaacctcctgtttgaaatgtcaccgcgtccgccgccggcggcgcgttgcttgcttgttcactttggattataccatacgtttaggacagttaacagtcctttttcgcatttttcctgaaaatctttctttatctctgaaaaatttttatcatttcattcggtgagcgcacagtggcaaaaagtgttccgccgccggatcccgatcgcatacttttctctttacgcaaggataacaccgtattatgataatgtcaatttgcgaaaaccacgattttctaagaggagcgccgcactatggcacacaaaataccatatatcaaatacctctcggctctgctgctgtccggcctgaacggcgtggtgatactcaacggcgttagcggcggtacacggagcgccgtgtttttctccgtgctgctgctgggcgaaacgctgacgccgcccgctggctggacgcggccatggtgctgagcagtgccatgctgggggaattcgtacatccgcgaaagtaacggaaacgatctccccgcctcccccgtgcaaagcgcaaaacctccggctgagccggaggttctgctttatttggcgcatatctcgctgatggctgccaggagctccgttttgccagtgcccttctcagcggaaaaggggatcagcagcgcctcctccggcagggtcagtgtctggcggatcagggccagatttggctcgatctcgctctttttcagcttgtccagcttgttggctacaacgatgaccgggcagccggtgcccttgaaccagtcgcacatggtcacgtcatcggcggtgggcttgtgccgcgcatccacgatcagcacgcccagggtaatgagcccctcctcggcgaagtaacgctccatcaggcggccccagcggtcgcgctcctccttggagaccttggcatagccgtagccgggcaggtcggtgaagtatagcctgccgtcgatgtcaaaatagttgatctggctggtcttgccgggggtagcgcccacccgggcgaaattcttgcggcccagcagccggttaatgacggaggacttgcccacattgctgcgccccgcgaaggtgacctggggctttccgtcgcggataaatgtctccgcccttacggccgagagcacgaactccgccttattaaagttgatcgccatgacgcacctcctgcatagccggactacccatcaccgccagatgctccaccgccgcctcttttttcggcagggtcagtgcatgggcaaacacggcgtccaccgtctcggcagtgataaagcgcaacgcctcccgtacggcaggatcgatgtccgccaaatccttctcgttttcccggggaatgatgacggtccggatgccgctgcgcttggcggccatggtcttctcccgcagaccgccgatgggcagcacgcggccccgcagcgtcacctcgccggtcatagccacatcgtggcgcacggcgcggcctgtcagggccgacagcatagccgtggcgatagcgattccggcggaggggccgtccttgggcaccgcaccctccggaaagtggacatgaatatccttggtcttatagaaatccggggcaatgcccagctcggcggcacggctcctcaggcaggtataggccgcctttacggactcctgcatcacctggcccagattgccggtaagctccagcttgccggtgccgtccatcacacctgcctccacctccagcagctcgccgccaacctcggtccacgccaggccgttgaccacaccgatctggtcgatcttgctgcgggtatcctcggcatagggcggcgtatccaggaattcacgcaggttcttagctgtaatgtctatgcgctttacgcctgtttccaccaaacgcatggcggcgcggcggcacagcttgcccagctggcgctccagcgtgcggacgccggactccttggtatagtcggtaatgatggcccgcagggcttcatcgtccaggcgcagctggccgcggcggatgccgttctccttcagttgcttgggcagcagatgctcccgggcgatgtgcagcttttcttcgtcggtgtagctgcccagctcgatgacctccatgcggtcgagcagcggacggggtatggtggatgtggtgttggcggtggtgatgaacatcacgcggctcaggtccacaggcagctcgatgaagtggtcgcggaaagccccgttctgctcactatccagtacctccagcagggccgaggccgggtcgccccgcatatcgctggccagcttgtcgatctcatccagcaccagcagagggttcatggtaccggcgcgggtcagggcctcgataatgcggccgggcatagcgccgatatacgtcttgcggtggccgcggatatccgcctcgtcccgcacgccgcccagactcagccgggcgcacttgcggttcatggccttggccacggacagagccacggaggtcttgcccacaccgggaggccccaccaggcagagtatcctgcccttggcgtccgggttcagctgccgcacggcgataaactccaaaatgcgctgcttcaccttatccaggccatagtggtccttgtccagtatctttcgggcctgcgccacatccgccctctcccgggtgaatttgtgccagggcagctccagacacacatccagatagttgcgtatcaccgaggcctcggcgctgccgaagggctgcttgcccaggcgctccacctcttttgtcagcttggtatgtatctcctccggcaggtccgccgcctgtatcctggcggcgtactcctccaactcctcgtcgccgtcatcccccagctcgtgctgcaataccttcacctgctcccgcaggatcatgtccttctgcacctgggccacgcggcggcgcaccttctgctccatctcgctctccagcgagatgacgtccacctcatgggtcaggatatcgttgacgatacgcagacgcttatccgggtgcagctcctccagcacccgctgacggtcctggtgccgcagggtgatattctgggcgatcaggtctgccagacggccggtatcactgcaatccagcaccgcggcggcgaagtcttcgccgatgccgttggccagctcgcggtattcaccgaagagcacataggtccggcgtatcagcgcctcgctgcgggccgtatggcgggccgccgtctcgggcagcagctcggcctgggcctgcaaaaacggttttttctgccacagccggtgcagccgcgcccggctctcaccctccgcgatgacacgcaccgtagtgtccgaggtcttgatgatctgcaaaatatgacacaccgtgccgatggtgtacagatcctcctctcccggctccgccgtggacaggtccttctgcgtcaccgccagcagccggcggtcattctccatggcgttgtccagagcgaagatggagatatcgcgctccgcgtcaaaggacaccgtctgcccggggaaagccgtcaagccgcgcagtgccagcaccggaatgttccgggtgatcgtttccatagttgcctcctttctcccgccggacggcgggcgttgggaaaagggtagtatccgaactgccggaaaagccttggcttttccggcagtctgagtctctgttaagacgccggggcggtggaggtcttctccgccgtgccggtcttgaatttagcgcgctgcgccaccttttccgggtcgtgcagcaccgtgggctcggcattcccatccacacacgcctttgtgatggtcacatcggtgatggtggggtcggagggcacatcgtacatgaccttggtcagcagtccctccatcaccgcccgcagaccacgtgcgccgatgttccgtgccagcgcggtgtccgccaccgcctccagcgcgtcctgatcgaaatgcagctccacaccatcgtagctgagcagcttctggtactgcttcaccagcgcgttcttcggctcggtgaggatacgcaccagatcctcccgggtcaggccctgcagggcggtgatgaccggcatacggcctaccaactcggggatgataccgaacttcagcagatcatggggctggacctgctggaacagttcgccggtatggcgctctttcttgctctgcaccgcattctcaaaccccatgctgcgcttgcccacccgatcctcaatgatcttctccagaccgtcgaaggcgccgccgcagataaacaggatgttgctggtatccagctggataaactcctgatgggggtgcttgcgcccgccctggggcggcacattggcaacagtgccctccaatatcttcagcagcgcctgctgcacgccctcgccggacacatcgcgggtgatggacgtattctcgctcttgcgagcgatcttgtcgatctcatccacgtagatgatgccccgctcggccagctctacgtcgaaatccgccgcctgcaaaaggcgcagcagtatattctccacgtcgtcacccacatagccggcctcggtcagtgtggtggcatcggcaatggcaaaggggaccttcagcacccgcgccagcgtctgggcaaacagcgtcttgccggagccggtaggaccgatcatcaggatattgcttttctgcagctccacatcctcgtcgccgccgaaataaatgcgcttgtagtggttgtacaccgacacggacagcgccaccttggctgcctcctgcccgataacatactggtccagcacgtcgtgtatctccttgggcgtaggcaactcgtccatgctgtctataccgtcagcgcccgcggtgtagccgtcgttcaggatatccatacacagctggacgcactcgtcgcaaattcggacaccgggaccctgaatcatgcgatggacctgactctccggcttgccgcagaacgagcagcgcagggccttcttatcttctgccattcgtttttacctcttatatatgaccttatccaccagaccgtattcccgggcctcctccgcgatcatccagttgtcgcgctcggaatccgtcttgatctgctccggcgtcttgccggtattctccgccatgatcttgttcaggcgctgcttgatcttcaggaaatgctccacatcgatctccatatccgtgaccttgccctgggtaccggcggagggctggtggatcatgatctccgcgttgggcagcgcgatgcgctttcccttggcaccgctggacagcaggaacgcacccatgctggcggccatgccgatgcagatggtggacacgtcgcacttaatgtactgcatggtgtcataaatggccataccggcggtcacgctgccgccggggctgttgatatacatctgaatatccttgtcggggtcctgcgcctcgagatagagaagctgcgccacgacgaggctggcggtggtatcattcacctcttcgcccaggaatacgatacggtcgttgagcaagcgggagaaaatgtcataggaacgctcaccgcggttggtctgctccacaacgtaagggactaagctcataaaaaatacctcctgtatgatagatgcctgattatacccacccgactgtgtttttcataagagcccgcggcggcgggggaaatgttttcaccccgccgcgccggcttttctctcttgtatacagcgaattactccgcgtccttcttggcggtcttcttagccgcaggcttcttggcgggggccttctcggccttctcctcaccctcggccttcttcgtcgtcttcttggcggcaggcttcttggcaggcttctccacgatctcgccctcggcctccagctcggccttctcctcagcgggggccacagccttggcgctgtccgccacgaccttgatgaccttctcacggatgacctgctccttcacttcctcggggcgcagatacttcttcacggtatccagatccataccgtatttgtcggccacgttcttcatctcagcctccacctcgtcgtcggtggcatccaacttctcggcatcgatgatcgccttgacggccagatccatcttcacctgctgctcggcagggccgtaggcctgcttgataaagtcggcctcggtggtgttggtcatcttcagatactgatcgaagggaataccctgggaggccagctgctgcttgaagccctcggtcatctgagcagcctgcagctccaccatctcggtggggatctcggcctcgacgccctcggccaccttggccatcagcacgtcctcgaaagcgcgctgggcagcctcggtgcgctcggcggtcatcttcttcttgatatcggccttcaggtccttcagcgtgtcgaactcggacacatccttggcgaactcgtcgtcaatggcggggacctccttgaccttgacctcgttgatcttcacatggaagatcacgggcttgccggccagctcaggggtgtagttctcggggaaggtgatgtcgatatccttctcctcgccggccttcatgccgatcagctggtcctcgaaaccggggacaaagctgccggagccgatctccagatcaaagttctcacccttgccgccatcgaatgccttgccattatcaaagccctcaaaatcgatatccgcggtgtcgcccttcttcacggcgcggtccacggagaccagacggctgttgcggtccgccatctccttcagccgagcgttcacatcggcagcagccaccttgacctccgccttaggcgcctccaggcccttgtactggcccagcttcacctcagggtatatggccacggtgcacttgaacaccacaccgtccttggtgcagctctccagctccacctcgggatagccgacgacgttcagttcctgctccttcacggcggcctcataggcgtcggggagaatgatattcacggcttcctcataaaagacctcggcgccgtacatcttctcgatgatcttacggggggccttacccacgcggaagccgggtacgttgatcttaccgcgcatcttcagatacgctttgttgacggcggcctcgaattcctcggcgctcgtctcgatggtcagtgcgaccctgctcttttccagtttctcgcagcttttcacagtcatttgttatttcctccgttccgcatggacaggttgtcgtgccgatgtccatacaatatagtatcatagcagaaagctacgaaaatttccactattttttttagttttttccctgttttttcagatttctgtatgccgcagcaattagtgatcaatcgcaaatcttgacaggggtaaaatccaggtagtcagcggccaccagatggaattccgtgttgtaatggcggccctccagcgcacgcttctgggcggcgccgtggaggtggccgaaatagcactccttaacgccgtagcgctgcagcaggcgcagtatctccggacattcatagccctgatacaaaggcgggtaatgcagaaaacatatctttttacaactttctcccgccattttcagggatgtttccagccttccgacctcccgcgccaacattttttcgttgtgtgtgccctggttgtccagctcgtaaaaccagccgcgggtgccgcatagcgatatatcgttataatgcaggcagttgttgtgcagtatctccagggagcgcagcccgtgctcgtcaaaaaagcgctgcattttggcagcggtgttccaccagtaatcgtggttgcccttcatcagtaccttgcggcccgggaggttgtggatgaacgttaaatcgttcagtgactcctccaggctcataccccagctgagatcgccgcagagcacggtggtgtcattttccgtcaccgccgagaaacctcgttgtatcttctccacataattctgccagcggtcgccgaagatatccataggcttgtcgctgcccagggacaggtgcagatcgccgatggtatagagtgccacaggtcccctcctctctttattttcagtatatgtaatgtgatatcacttcacaatatccttcgccagttgttccagaaaatatcctccagcagcgactggggataccccctctcctccaacgcctgatagagcttagccacgtcctgcacgccggtcatgccggcagccagggcctcgcagccatccaggtcgccgccgatggcaactgtcgactcgccgctaagtgagagaaaatgctcgatgtgggcaatgagatcgtccatgtggccgccgcctacgaaatcgaggtagagattgatgccgaccacgccgccggtatcgcggacggcgcggaacatatcatcggtaagatttcgtctgtgcgggcacagaccgggggtgcgggcgttggaatgagaggccacgacggggcctttcgctgcctgtatcacgtcccagaaaccggcatcagatatgtgagaaacatctgcaaatattccgtattcatacatttttgcaacgaattcacgaccataaacagacaatccgcggtcaggctcatcggcgcaagagcctgagaggacattggcgttgttccagaccggattgatcagtcggacgccccaggaggccacggtttccaggtgatccagggcacagtccagcaggtcggccccctcgacgctcaagagcgcggcggtccggtgccgggcagctgcggcgtccacctccgcgccggttttgcagcgtgagaccagatcggaattttcctgtatttgggaaaggaaccaatcgtgcatttcacgaagtttcgtccatgcggtatttgggggcagcgcgcgtacatcgtcgtacagggcaaaaaattgagcgcgtttccggtagtgttgaccacggagcaggtccacgtggcccctgttttcccgcagggcggcgcaggcggaaaagtaggcgcggcactcgtcctccgtagcgccgtagtccggcaccgcctctcttttcatgcagcgccatatcgtatcacaatgtccgtcaaaatacggtatattctgtatttccgtcacaaaaatattcctttcttacagcagcgaaggcaggctgtacccccctgtttttttcggttttctttccaatttctgtcactgaaaggcatcctctacatacacgatacggacgcttttttcatccccgggcgcggcggcgtagacctcggccacatcaaagcgggcggggcaatccaggccgttgtcgcagaggtaaaagagcgcggtttttcggatacgggcctgtttgccggcggtgacgtattcccggggcaggcccatctgcgtattggtgcgggtcttgacctccacgaagcagaggacgctcttatcccaggcgatcaggtcgatctcgccgaagcggcagcggtagctgtgtgccgccagcttataccctttttcccggagatagtcggccaccagagcctcgccccaaacaccttctgaacggctcatcgttaacctccccttttcgacgcggtctgcacaggaaaaaatcccgctattttctgtgcagatacctgtattttgtttaaacgtttctgataccttgtctctacttttttataccggatctgtatctgctcggtatccgggctgtaccttatgtgagtattctgtagatgctctgtgccatgccgtgaaaaacgctttatgtccgcccaccggcggaccattttttcaggaaggacatacgatgttccgcgcatgggccgaacttatccagcatttcgtaatgcagctttgtaccgtagcccttgtgccttgcaaactgatactccgggtactgcttatccagcacgtcgatgacatagcggtcacggctgaccttggccaggatggaggcggcggcgatggaggcggcgtgcgcgtcaccgcccacgatacagcggtggggcgtggtgacggcagcgaacttaccgtggtcacggttgccgtcgatgagggcgaagtccggccgtggtgccagaccatcgatggccagctgcatggccttcatgcgggcggagaggatatccgtctcgtcgatctccccagcggagacggaggccacggaccaggtcagggcctgctgctgtatcctcaggaaaagggcctcccgcttcttttccgtcagctttttggagtcgttcaggccgggaagctcgaacttctccgggagaataacggcggcggcgtaaacaggtcccatcagcggaccggcaccggcctcatccaccccgcagacaagggcatagccagcgtcatgggcctgctgttcgtagctcagatcttccatatcagcaatactccactattatcttcctgcacgcgcggcagacggaggcggagagcttcgtttcgctgaaggcagaccccgtcgaatagtgccagccgtccagcacgatgccgttctgaccggtgatgtatttcttcgtcaggatcagggcatcggcatcgccgtccggcggcagaaagtacagaccgcggctgccgcaggccaggagcttaccctgctccatctcttttccgcaaacgggacaattcatggcgttacctcctccgtgggtgccgtctccaacgtgaagcggcccagcttgccggcacggaactcgtccagcaggatgcgggccatgcgctcggtgtccacctgggcgccgcgcatgagaaacccgcgcttacgcccggccttctccagcagctcgtagccggtgtcgccgggctccacctctattttatagcgttcggtgagggtatcggcgtagtgggcggccaaatagtccatgagatagcaggccagctcctcgatatccagcacatcgtccttcaccgctcctgtaaaggctaaacgcttgccaacctccgggtcgtcgaacttcggccagaggatgccgggggtgtccagcagttccagcgtggggtccacgggcacccactgcttggaacgggtgacgccaggacggtcctcggcccgggcggtcttgcggtgggccaccttattgataaaggtggacttgcccacattggggacacccaggaccatgacacggaccaccttgcctacctggcctctggccgcggcggcggccagcttatcccgcagcagctcgcggacggcggcggaaaatttctcggtacccacgccgtttttggcgtttgcctccagcacggcatagccttgggcgcggaaatactgggtccagcggcgggtctcggccgggtcggcctggtcggcacggttgaggacgatgagccggggcttgccggcggtcagctcgtccacgtccgggttgcgggaggacagggggatgcgggcgtccacgatctcgcagacggcgtccatatttttgatctcggcggagatcatgcgcttggtcttggtcatgtggccggggaaccagctcagattgtcgatttgcatgggacacctcctgaaaaatcttacaaaaccagtcggatattccgccacctcatccgccccgtcgcggggcaccttcccctcaaggggaaggcaatttggtacctgcggcggcgatggtaccaacctctcaaggagaaggccggcggctaacgccgcacacctcatccggcgctgcgcgccaccttcccctcaaggggaaggcattttggtgcggcggtcatctatatggcgcagaatatccgcgcaaacctcatcgtagcggcaggtcacatccgtattcgcatagcgcagcacacgcagacctaatgccgacaatgcttcatcacgtgccctgtccgcctctatgcccgcggtgtcgtagtgctgcgagccatccagctcgataaccagccgcgctgccgcacagtaaaaatccacgatgtactgccctatcactttctgacggttcaccgtaatgggaaggccgcgcagaaagccataccaaaggagcctctcctcccgcgtcatctctctgcgaagtacctgcgcgtttggcgtaagatgtctgttatttcgtgtgttcatcgtctcaccccttgcagtatagcacagggtggagaaaaagaaaagcacccacttttggtggatgctctcttttggatcgatgcttacagcttctcgcggaccttggctgccttgccgacgcggtcgcgcaggtagtacagcttggcgcggcggacatagccgtggcgcacggtctcgatcttctcgatagagggagagtggacagggaaaaccttttccacgccgacgccgtaggacaggcggcggacggtgatggtctcttcgatgccgccgtgcttcttggcgatgacggtgccctcgaagacctgaacacgctcacgggcgccttccttgaccttcacgtggacgcgaacggtgtcgcccaccaggatctgggggacttccttcagctgcttctcgttcagtgctttgatgagatccatggatatttcctcctaaattataggtgttcatgccgccatttggcgatatccgcgcacatttgggatatcggcgacagaggaccgcccttttcacgccatgatagaatagcatagatggcagagaaatgcaagggttttttactatatcagcgaaaaatgttgccggaggcgtccagcagctcgcggcggcggatacgggtgaagtccggggtcagcgccggcaggtgggccgcgatggccttctccagcagctgagggttcaggccggggttctgggcctggaccaccacggtgccggtaacggcatgagcgccggacaggaagtgcacttcctgtatcatgggagcgatatcgacgtcggccaggtccttgcgcttggtgcgcttctggatgaccagctctgggcgggtgaacagggccgtcagggcctcggcagcgccggcggggacgccgtcgtcgtactcaaaggtgacatccgcccggagatacgccaggtcgcggacggggcgggacgccggatagcagtccagcacgcgaaggccggagggcataccggtgttgagcttttccgcgatgccgctgccgtcggtgtcctgggtgacctcgaagtccaggagctcgcagtcgctggactggcccacgggcaggggcaggacgatggagatgatgggatgggggtggtagccctgggagtgcttgatgtccagctcggtgcggggaaaggcgcgctggaaggtgcggagcaggtccaggtgggaaatgtaggaggcctgggcctccttgatgaacaggagacggagcttagacatcgcacttccctcctacaagtttgttggcgccgcagccgttgcagcgggtgcggcagtcgggggtggtcagggacgcataggcctgatggcgctcacgcttcagatagtcctgcgtcacgccggaggagatcatgctccacggcagcagctcgtcctcggaccgggtgcggttggcgtagaaatgggggtcaaggccgcattcgtcgaaggcctccagccagcgatccagggagaaatactcctcccaggcgtcaaggtgagcgcctttacgccacgctgtttccaacacttttcccagacggcggtcgccccgggccaggacggcctccaggaagctggtgtcggagtcgtgccagttgtaggtgacagtcttggtcttgatggcgtcacggagcagggtcacacggcgctcgtactcggccttggatatctgcggctcccactggaaggcggtatggggcttgggtacgaaccagctggtggagacggtgatgcggacgccccgctgcttgttctgggcgctctcgcgccaggcgtgcatgacacgggcggccacgtcggcaatgcccaggacgtcctcgtcggtctcggtgggcaggcccagcatgaagtagagcttcacggcgctgtagccgccggcgaaggccgtgcggcagctttgcagcaggtcctccagtgtgacgttcttgttgatgacgtcccgcagccgctgggtgccggcctccggcgcgaaggtcaggccggtcttgcggcccttggccagccgctgcatcaggtccatggagaagttgtcggcgcggaggctgggcagggacaggctgacatggcgggcatcgcagaagggctccagctcgtcgcacaggtccgtcagcggcgggtagtcgctggtggacaggctggagagcgtgacctcctgatagccggtgtcatcgcaggagcggacgcagtagtcggcgcagaggtcgcggctgcgattacggaccgggcggtagacatagcccgcctgacagaagcggcagccgcggatgcagccccggaacagctccagggtgacgcggtcctggacgatctcggtggaggggacgatggtatttaccgggaaataggacttgtccatgtcgtggacgatgcgttttgtcaccacggcaggtgcgccgtcgcggggcgtgatggacgccacggtgccgtcgtcgtgataggtcacatcgtaaagggacgggacatagataccgtccagtcgggcggcggcgcggagaaaatcggccttgctccagccctcgcggcgggcgcggcggtggagctccaccagctccacggtgacgtcctcgccctcgcccaggctgaccagatcgatgaagtcggtcaggggctcggcgttgtacatggcggtgccgccggcgatgaccagcggggtcaggccggtgcggtccgcggcgtggagggggatgtgggccaggtccagcatattgaggatggcgggaaaggccatctcgtagccaacggagaaggccacaatgtcatagtcggtgatggggtcgccggattccagggcaaaaaggggcatttccgcctgacgcagctcggcctccatgtcgccccagggagcgaacacgcgctcgcaccagacgccggggatattgttcattacgccgtagaggatacgcatacccaggttggacataccgatctcgtaggtatccgggaagcagaaggcgatgcgggtgtctaccgccgccttgtccttgaggatggcgttatattcgccgcccacgtagcgggcgggcttttgcacccggggcaggatgcgttccagtcgtttatccatggtgtagtcctctcccctcccctgcccgacggagcgtgggcggggagctatttcttgtaacagtttattttatccggttttgcgccgtttggcaagaccccttttacggccagccagaggacgccgggcagcaggaacagccccgcgccggtggtcagcgtcaggtacaggcacaggaccagcagggcggcggagacaacggcgcccaccgcataggccacgcggtcggcggtgtagggctcggtgcagagcgccgtcagcagccagaggaggcggccgccgtccatagggcggacgggcagcaaattcagcgcgcccaggatcaggtgggcgccggcgaagggcgccagcgcctcaccgcccacggaggacagcagcgcccagagcaggaggttgcagccggggccggcagccacggccagcagctcgccgccgtaggacaggcggtggaggtccggcacgtacagctccgcgccggtggcggagagggtcaggcggcggggcggcttgtggaacgcatggagggtcaggacgtgggccagctcgtggcacagggcggcggataggagcgcggcaggcagggtcaaccctcgggagagcagcagaaacgccgccagcagcaccagcgcagagggcgagacggtgagggcggcggatggcttacgcaaatgtaacataataaatggggttcagataggtgtcgccgtggtgaagttcaaaatgcaggtgaaagccggtggcacggccggtatcccccatctcggcgatggggtcgccggccctcacctgctggccgtcggaggcggtgatcttacggcagtgggcataaagagtggaaaaaccgccctcgtgggtaacggtaacgtagctgcccaagtcggtgctgctgccaatagccgtcaccgttccatcggcaaaggcgcggatgaccgcgccctcctcccccgcgatgtccaggccgtagtgaaatcgaccgtcgccctccagggggtcgctgcggcagccgaacagtgaggtgatctgacccgccgagaccgggtcaacgtagtcgaagtccaggacccgctggagcatctccacattgtccggcagtgtctccgaccgggagacagcaggggcggcgggtatctccgacgtgccgaaaacggcggtgtaagcatcgttgagggcgtcggagacggtggacccgtccgcaaaggcccggccggcagcggagaacacctctacgaagtcggtatcggcacccagcagatccagcagtgtggcgcggcagcgatccagcgccgccggaaagagaaatttcatggcgatgaccgccaacagcagcgcggcggagatcaccaactggaccatacggcgacgggcgccgggaacgggcgccgcagcggacttcgtccggtccgggcggggcgcggggcgagacggggctttgcggggcgggacactgcggcgggacggggctatgcgtttaccggcgtaggacacggggcgctgggacatggcggaacacctccttcttttccagagcactatatgcaatagacgaaggcgttagacatacaagtgaaagttgggaaattatacttgacagccgcgccgtcaggaaatataataggagggctgacggggtgtagcgcagctggtagcgcgcttggttcgggaccaagaggccgggggttcaagtccccccactccgaccaaaaagggaggccaaaaaagatattggggataaaaacccagtgttttcaaggcttccgaggcccgtagatcagtagatctacgggccttattttatcgatatttgacctcgcacgattcactcagacgggagtaaaacccgcaggtattaaatgatatagaggacagaaaaagagcggcgatattttctgttggaaaatatacgctgctctttctttttgccggggcctcaaaagaggtcccggctttttcattttcaggggaggaatgagtttggaaaataaatattttacagagttggcacaccgcctgcaggcagccgggatcaccacaggacatccggagaggaaccagctgacagtgttgctgaacgaccagccggtcctctttgtttcatcagagagcgatgtgttcctcctccctgccggaagcaatcctccggaggccagtgaactataccacaaagttgcccagactgcagaagaagtgtatgcctatgttgaggcgattcagaccgctcccctccttcatgccagcggtctgagtgagaaattccatctgctggcggattttggcggtgcggtgctggctgggcgtgaattgggaaatggctggggttatcagtttgtcacctggatctgggatcatgacaggaccggggtgagtcacggacactattatgaggaggatttccaaggagccaaacaggacttcgccgtccgctccgggctgatctccaaggcccagctttttttgccggaggagttaacgcagctctatcgggccacagactatctgctggatgaaggacctgagccggaggatggccagctcaaggccctgcagacttcaagaacaaagatcgaatacactgtcccggatctggtagagcgtttggaacaaagccagggacaggagccacaaatgaatctgtaaacgcaccggaagaatggggcctgcatctgccgatgggcagaaaagcaggccccgttctttatgcagaaaggaacagcaatgacaaaatatttttcaaaagacactccgttggccagtttggagcggatgatgatgagtgttcccggctttcagaaacggggtggcgggatgatggttctgtgcagattccattacaaaaaagaggatgtggactgcgcctactgccagagctatatgcggcatacctgtcaggcgtctgtttgcccatacattccggagcggttggaagcagggactgttagctaccaggaacttgcggagggatgcctccacatggcaggccaccaaaagctatggaaccggctcagctctcttcccaaaggaaagtcgcttcctctcgtgttggaaccggcccatcggcgcaggctgtctgagtggctggaggctggcatagccaccagctgcccccacgagctggcggctgcctatctgctctcttcccgcgccgggctctggcggagagtgcttccccatatatctcacggcaggatcgatttctcctccatttccctgcgggggatcgacccgcgggactatcctgtgtacagggcggccaagggcctctactgcgggacgctgctcattacttcctcagaattggcggacgaggaacaggtcagcagcgaagccttcggtgatattctcaacgctatgctaatcgcgcggtatggaaaatcgatcatggctgcggaggtgagaaaatgagctatgtgatccaagcggtgctaagcaacgcccagcatccggaatatggccaggtcacgatacccttccccatccccaatcagaactatgactgcacgatagagctgctggaacccctggagatcggcgatacgctccggcaggattgtcaggtggatgagttggacagcttctataccgtcctgaacgctctgatcggcacacaggtcacccttgatgaactggactatctggccaagcggctggacagctttgatgacggagaggccgcccagttccaggggatggcccacaagctggggctctcgaaaataaaggacctcatcaatctgaccttctgctgccagaaggccactgtgatcaccgatttttccgaccttgaaaaaatcgggcgggaacattacatgaatttgaatggcggctgtgccagaacagaagatctggaggcgctggatgggaccgaaactgcctatttgctcattgacagcggagccgggacagtcactccctatggtgtggcctatgacaacagcatgaagttggagccgctctacaatgggcggcagtttccggaatatctttatgacaacagcagcatgggattgaaaattgtaccagcagaaaaccaagccccggaactgctttggctccccgcgtcagagcagcagattcgccgcaccctgctgcgggcaggctggcaggatcctgaccatgcggactacacgatagatgtattcctgcttcagaaggaggccggcaggatactgaatgaaaagcgagacagcctgcattcactcaatgccatgtgcggtgccattgcaaaactggagcagaaagacagggataagctggaagctgtgatcgtatttgcagaacctgagaatgccggtgcgatccgtcgtctggctgaaaatctggagcagttcgactttattcccggcatccacactccagaagaatatggaagatacatgatccgagagtccggccggtttgaatatgatgatattctggaggccttctacgattacgagggctatgggcagcaccgcatccaacaggaaaatggccgcttcagtggctatggttatgtgtcctatcccggaacaatggcgctggaggatctgatggcagaagacccagccgaagcatatcaagcggaacagggccttcagatgggtgggctggaatgaaacaacagaaaaagaactggcctgctgaaagcaatatgactgccctaaaaacactgtcgcacacactcctgcatcttgatatccaacctacaaaaatgtcaccgctggtggtcaagcacccctttacagacagcggcctggctgggatatatgccgaggatggcagcctttcggtgggaaatctgctggacagccctgatgcactccgcacttggagggagaatttcagtcggcggatcaatgaagcagaaacggccatgaacctcttttgtatgattacgaaaccctatcaattcggctatctgagactggcggcggcacatctgtccgagcaggatatggcctcatttctctcctatgcatggatcagtacggaaagccccaacaatgacccaaatctcagccaaagagaactgctgtccatgttccgatcccttgacccgcagaagctgatggatcaggaggaatacacacagttccagaacttggacgatgtggtgacggtttatcgcggtgtgacatcgtataacgccaacaacatcaaggccctgtcatggactctgaaccgtgaagtagctgagtggtttgtccaccgttatggcgaggacggcatagtctatgaagcacagatcaacaaagagcacacctatgccctttttctgggcagaaatgaggaggaagtcatcgttgaccccaagcgcctcatcaatcttgtcccatccccatcacaagagccagttcagggcccagatttatctatgtagtggaagtcaaaaacatttttcaatttcagatagctattgctgtcagagtgtggtagtgttcgtgtcgaataccgattgaccgggaatgaggaggcgcaaatattgaaattgaagatgactttagatgaactgatcaacactatggaaccgcaagtccggaaggataaagccctaatctccaaatgcatcgacggcctcacagaatacgccgctgagctgcggcagaaagcaggagatccgggcaaggcgcagaccccggacctccgccgcttggtgagcgaactggagggttgttggggcctggataccgaggtcgtagactatgtggcagcctttgaccggaagatacaggaagcggatcaggcaacccacccatgggcccccacacaggagcagaggggcgctgtgatgaaagggatatgtctccattccgtggatataatttccagtcttggggccgatgatgccagaggccgggtggcaggatgtgaaaggctgatacaggaaatcgccggattctgggattttgactccctggtaccggatgacttatgcgcccaaatagaagcctccctcaaagagcaggaggtatgggaaaacacggtggagatgggagggatacaatgagcatcaatgtctggaccgatcccatgcagcacgccgaattgtttggaaagcctgtgctctttaccaactggctgatcctgcgggatttggttcccaagggctggcactgctatgatctgcagggcacacagaataatccgaatggccatgctgcgctggttgacagggaaaatatcttccacacaggaaccatcctctctccccagcccctgaagcgtgaaggcactgtctcccgccgggtcaatggcagctttcatctgctgggtgaggaaatgacgctggagcagttctgtgagaaacatgatctggaatatccccaggacacgcgagagttcatactgcgccccgcctctccggatgaggcggggttattctattccatggatgcggaggaggacagggtcctggggacagtgggccacctgcggatagacttcggccatggtggaaaggagttctggcatacctggtggcctcataacgacgaccagttcaacacaccggaattcaaggatattctgcagcggtttgtagacagcctgcggcaggatggccccttaaaggatctgaaagccatgagtacctactgttggcagcacggcggccctatcacagaagataagcgcagctatggctatctcgtagaagtgggaaattaccgtctctgcctccgctgcacccctgttatgggcgactatcaagggtactgtttatgtgcttgagcacataagagataatatgtgacgagtttgtcacgagggcggtggtgggcgaaatgacttgaaataagggattttttcataaaaacacctcacataatattttgcgcttgtctgtctgcgcacaccttgggataatgaaaatagtcgctgatacagtaaaattttcaaaggagtgatgcagtatgaagcaagcttgctcattagaatcaatggttgatgccgtactgtctgaaatgaaaagacggggcaatgcaaaaaataccatcgaacggcatgaaagggcatactcacaattttacgagtatgccctaacacaaggcgaaaacagctattcaaaagttctggcgagatcttttttagaggaaaaggaaaaactatcagcctaccgaggacctcgtttcatggagcagtataggattgcgctgaataaactggacgatattgccaaaggtcaagatatccgtttgaggcatttggaaaacggctatcacttgaaatcgtcttgctttgactgggtaattccgttctttgaggaacggcttaaacggcggctaaagaacacatatgatgttaggactcggctgcgtatattgtcactgtttctctcatttattgagacacaaaacgcgaaaaagttggaggatatcagtattaatcatatagctgctgcgtttgaagcgtccacagaccagaaccactttcgcagtacaatccgcgagttccttagctttgctgcggaaaatgggtggatgcccactaatctgagttgttttgttccaaaaattcgacgtcatagaggcgtacctaccgtttacagtacagatgatattgaaacctgtttggcatctatcgaccgtactacgcagagtggcaaacgtacatatgcagtattacttatttgcgccaggctgggactgaggaacactgatgcctgcgaattgaagttctctgatatagattgggtcaagaagacaatctccattgtccagatgaagactggcatcccactcgtactgccgctcttaccagaaattgaagacgcaataaatcggtacattgcagcccgccctcaaagtgacctttcttttatctttttgcgtcataaagctccgtattatcctctgcgcaactcgacgctggattacgagttgcggaaactcttagaggagaatgggatcaatacagatgggaaaaagaaaggcgcacataccttgcgctccagccttgccagttcacttttaaaagaaggcattcactatcctgttattcagaaagcactggggcatagcagccctaacgcaactaagtactataccaaaatcgatatctcccgtttgagagattgcgcattggaagtgcctccaccttctggaaactttgaacggcttataaaggagtctggacatgcgtaagaaaaaaacttttgaatataccagctactttgcagcagagtttaatggttttctgcaatatagaatttctggcggcagcaacggtcttgaggaacgacgcgtattaaaaagtctggatgactatttgatacaaagtggaatggtgaaaaagaaactggatggaattatcgtagatgcatggattaattctttgaatgttggtggaaacacaaaagcgcattatgtcagtgtttaccggcaatttgcacactacctcaccggattgggttataaagcgtatatcccaccacctttacaaataaaacgcaactatactccgtatgttttcacatccgaggaaatgaaacgattatttgaggcatgcgacaatattcccgcgagacgcagtttgacaaaagcagaagtttggctcccggttatggttaggatgctttatggttgcggtttgagggttggcgaagcagtttctctccaaaataaagatattgactggacagagggaactcttttaatcagggctgccaaaggaaacaaagaccggttggttcccatgagtaactcgctgattgatgtttgccgtacatatcatagtattgcgcatccatttcctaattccgaggatttctttttttataatcacaaaaaacaacctctttcaactcttaccccctatatttggttaaggagggctcttgaaattgccggtattgaccgtcatccgtaccctaaacagttgaggggtgtctgtgtccactgtcttcggcatacatttgcggtacacacattacagttacagagcaaacgaggaatagatcgtttctattccgtaccaattctttcaacttatatggggcatacagatatttatggaacggaattgtatcttcgcctcacgcccgaatgttacgaacacatagtggattgtgcggaaaaagatacgggtgacatattcccggaggtactaccatgaaaacaacgtcattttctcaacgccttgggacgtattttgatgagtatcttcctaatgttcgcaactatagccctaacacgattgcctcgtaccaagatactttccgccttctgctggagtatatggcggaacagcagcacataaaaccatacttgctggactacaaacacttttccgacaaggtgatcttatccttcttgaattggttggaaacccaccgtaactgcagtccctcaacccgaaaccaaaggctttcggctatttccgcttttttcaaatatgcttctcagcgcagtatctccgcattaaagatttgctccaatatagcaagtattcctccgaaaaagactcctcgccatattttttcatacttttccgtggaggaattgagagtcctgctgcaaatgccagaccccagaaaacctctggaacgacgggacatcgtactgctgagtcttttatacgacagtggagccagggcacaggagttatgcggcatacgagttggagacattcgatttagcaatcccgcaagtgtgcttttgcacggtaaaggcggcaaaagccgtgttgtacctcttatgaaccggcccacaaggattcttcagcagttcattgctgagcgcaaattcggaactgcagaaaaagatgctcctttatttttaaatcagcgcggcgaaccaattaccccagcctgtatccgaaacgttatttgcaaatacatttccagagcaaagaacatacgcccggatttattcaatgaatcttcgtattcaccgcacagttttagacatagcaaagcagttcatttgctggaggctggcacagaattagtttacattcgcgactttttaggacatgtctctgtccaaacgacagaaatatacgccacagtaagtcaatccatgctgaatagtgtcctccgcaacagaagtatacccaaggtgttgaatgtggatttgaatgaaatctcccacgatgcgatcccggattatttgagaaagaaaaaataaatattatgtgaggtgtttttatgaaaaaatcccttatttcaagtcattccgcctaccaccgccctcgtgacaaactcgtcacatattacctgtactgctacgatttgcaccagcaggaactggcccagcataggcggatcattggcaaggcaaccttcaccaacggagatcaaaaagaattcaccagtgcgcgggagtatctgcagatgatttgggaggaactgccggatcgaaatatcactggcttccggtttgaaacattgacggatgatccggaggtcaaaaaggcggtggatgatattctgctggattttggcggtgagggcaatcctcgccgcacctgtaactatggactggcagaggagggcaagcgccagcttcaagccgctgccgaaccaggcgtcccacatcagtatgagtggtttgtcatcactgaaatcaataccccaaaggagcagcactgccaggagctgacacttgaggatgccattcagacctacgaggacagcccccaaccggaaaagcggctgggtgtcactaagaatggtatcgctacagtggatcttgtatgcacctgcgagggtgagcagcggttcttcgaggactacaagaagctggccagttttcgagaggatccagtcattgccactgctgtggaaagaatccatgagaaactggggcaggatgcgccctgccaggaaatgcagatgggaggtatgtaaattgtccattccgaaagaatggctggcttttctgcgggagcagtaccctgcagggagccgaatcaagctcagagagatgaaagatccctatcacccggtgccgcccggtaccacgggtacgctggaaagcatcgatgatatcgggcaatttcatgtgaagtgggacaatggcagtggtctggctctggtcatgggagaggacagcttcactgtcctgccgcctgaacccaccatcatgaagctgtatatgcccctcaccgcagacttctatgagcggaacgaatggggtgacatcgaggactacagcacagaattggagggcggcagtctccgtaattacgaaggccagatcctcaaggccctcatcggcaaccggatgccggaggaagcggaaagcggcatcatgcactggtatgatgtagacgatgaggtcaacagaaaggtgcgctccgtggtattcacggtagaggagcatgaccggaaactctggggtgtggcagaatgccgtgtgattggggaactttccacccatgaactggatgctctcaaggagtacatcgccggtcaggcttcggatggctggggtgaaggctttgagcagcatgagatttctgtggacggcggagagctctatgttcatctgtggaacagcgatcactggagcatccagacagagcaggaactgtttgcccccaaaatcgcagaaggacttcccgagttgtgcttctcgacccttgcctccactggccagctcatctgcgtcaagcggggcgagaacggctactacccttcggactgggacaccggtgataaggagcggaatgtggagctggcagatgagctgaatgagaacctgggcgtcagccccgtccagcgtcaggccatggaggtgggcagtatgtgcggttgggatgtccctggcgcagatcccaaagccgatgagcaagagccgatgggcatgaggctcagttaggaggtgtcgaattggattatcagaaaaaagcgtttgaggttgagatcagcaacggcggacccagaggatatgaaactgctatcacactgaagcttcctgcaacctgggcagagtttcatgatgcgctccaaaaggcacggatccccgatggccggaattgcggcattgagctgacccgaagctggtgggccggcctctcctccgacctcatcggcggcgccaaaaatctctatgaactgaacctcttcgcaaggcggctgaccatgctgaccagtgtggaactgctttccatggatggcctgctgaaaatggaacaggcccagggcacaaaatccattccgcttcccaggcttatcaaccttacattcaatgcagactgccatatcgtccccgatgttttcaatgatgaaagcttgggggcgtttctgtatgaaaacgagatgctcacgaaagaggtcgagtgcctgctggacaccaccgaaccgggcagcggctatcgtgggcgtcttctggaggtctttggggaagaacatcgccaggccatcggcggtgtatttaccagctgcggctatatggaaccaagcggagaggcgtttgaggaagtgtatcggcctggtcagatggcttactttgaccggtcaggttccccggtggtgctggaagtgaccatgggctgttttgatgacccggcgtatgacagcgataaaagcgcattcctgaatcttccggctatcggaaacgccataggacaggccattgataaggtgggggccagctccgagaaggagtgcgggttccagtgcgtggaatgcctgatcccctcccttcgggagatgattgacgacgcaatagcagatgcaggagggcttgcccctgcggaaaaaatagccgccctgctcaaacagaagcagcgtatttggaatgaggacgccattataaaatataaggcgattctggaagcaagcggctgttctggcttgcaggatgccattcgattgatggaggatctggatcaatatgagctccgtccagatgtggctcaaccatggagttatgcggagctggttctgcgggagaaatacccggatctgccggaagcccttttccagacgggtcagtcagcggagatcggcagagagcttctggaggataggaatggggtcatcacaggatacggactaatccgcagactggacggtcagcccattcagtctctccatgaagccccggagcagaacggaatggagatgatttgatatggcagaagaacaggcacttgttcaattgatggatacactggacggactggaactgaccaaatccgaatacgagtggctggaacagcggtttgccgccatgacggaaaaggagcagttcctgttccgcggtgcgatgaagctggagaagcctgaaacagccagcggagccatcagtattgccagtcagcttcactgttatgagctgttttacagcgccggggacgaggacgctctgggtcagtttgtcatgaagcatctggagcaggttccggatgttgcccgtccctatctctctcccgcctatgttgggcagatgttccagcaggaaggagcctccggcgtgttttgcgaaggccattatatccggcgcagtgctgccccagaacatcaaccggataaaaacctctcagaactccccacaaccggcgaatacgccatccgtatcaagctggccagccgctccaatatggagggcgtctggatagggttccccgacgccggggaatacacggatcccaattatccggatgaactgcttttgggcctggacgcaatgcaggcagagagtctcagcgagtgcatcgctttggaggtggactgctgtctgccccagctgatggatatcctttcccagtatgactcagccagtgaacttgtgcgccatgccattgactttggacatgtatgggcagaacagggccagggtgaggcgtactggatggataaatggcaggctgttctggagctggaggactgccaccggctggatcaggcattggacttttcccaaaaccttcagcactttgccttcataccccgtggggtcgagcttggcagatttggcttcgagctggcggtcaagagccaggttattgaccggaacagctttctggccaaatgctttgatggaaagagctatgccgaatggtatatccaaaagcatggtctgagcgccaccgaccacggctatgttgcctggaatggaggggaactccattacgaatacagtgatttgggcggatcgccgatgacagcccagacaatgtgaaggcggcatttttgttggattttggtatcgctattccataaagcgtgtgatagtgttgcggagcaaaaggaggtgcttccaatggatgagcgaaaagagatcctgcaggataccatagaccgcctcatcgaaaccgctttgcaggagctggatcagaagctgcctgaagctggcggggaggctgctctctcccacatcagcgaccagctccgacaggacgcacagctggatgagcagcaccgcaaactgatgctggattatatccggcaattgaatcaggtgactcactgccagtgcagacacctctactgtcagggagcgttggactgtgtcctgcttctgcgagggctgggggtgatccggtaacaacagaataagaaaacacaggggccgtttttccgcaagggataacggcccctgcttttttgcgccctttttcggaaaaacgccccggaaaggaggcatccatgcagaaggaactgcttgcggagcatctgaagcgataccatccgtgtgctttgtgcgccgcaaccagccgggaattggaacggaccttttccatcaagggcacagagcttcggcagcttgtcaatcagctgcgccgggccgggatcccgattgccagcaactccagcggctatttttatgccgccaccgagcaggaggtacgggcaaccattggacatctgacccgcaggatcagcggtatcgccgccgccatccacggcctgaaccgctccctggaacagtttgacaccgaccagacccgcctgcccctgaaggggggtgatggcaactgaacagcttcatgtcctggatcggcggcaaaaaggccctgcgggagctgatcgtgagtctgtttccaatatactacgagcgatacatcgaagtcttcggcgggggtggctgggttctctttcacaaaccacccggtaatgatttcgaggtctataacgatttcaacgggctgctggtcaacctctaccgctgtgtcagggaaaaaccggaagaactcatggaggccctgcggtttgtgctgaatgcaagggaggatttcgatgctgtccgggcggcgctggcacgggacagccccgcaagtgatgtccagcgggctgcatggttctatcagctgatccgttattcctatgcttcgggattgaccagcttcggcagccagccccacgatatccggtctaatttccctctaattgaacaagcccatcgcaggctggcgaaggtcgttattgagaacaaggacttcgaaaggctgattcgccaatatgaccgccctgtgagctttttctatctcgacccgccctaccatgccacagaagggtattaccagaatatcggtgaaaatggattcaccgaggccgatcacatccgtttgagggacaccctcctctccatccagggaaagttcctgctgtcctacaatgacgatgcttttgtgcgggggctgtacgaccagccgggaatttttctgatggaaaccactcgcatcaacaacatcaagcagcggtacgacaatgggtgccagttcccggagttgatcatcgccaactatgatccgcaggagaggaaccggacaatgccctcccaaatgaccctctttgacggaaatgggggtgatttgcttgaacgaacatcaaaatgagctggagaagctccaaaaggcggccctgctgattgaggaaatgagtatgggccgtttgaaggtctgccccagtacggtgggccatgtatatatccgtccggagagcgacgcctatatcgggctgcagatgcagataacgcccgaatccactccgggacgatatgcggttacattcactgcctttccacgcaggatgggtcttgagctggatgcttccggcctgcgccggctgatgacagaggtcaaccagtcctacgcacttctgaccgcattggaaatgcagaaatatcatcccacccagtcggaactggagcaattcagagaatccatgatcgagcagcaggagccggagcagccgctcccattcctgaacccaaagctataaggaggaatgcaatttgaagtttgtaaaagaagtgaccggagaaaagatggccattcctgccgccgcactcaagctctgcgggtttgaaaacggggataaagcggaactccatgcactgcccagtgccgccattatcctcaagcaaaagatgaccgctatggaggtaatccgggctatggacgccctgcaccagctgaccgtggaccttagcgtgcatctggccagagccagcggaccttgcgacggctgtgatggcgactgtccctttgacggtctggatggacaggagatcgctctgcccgactatctgcgggaggaggctggaatcccggagaatgcaaagctctgcgcctacgtagatgaggatgagaataccgtcaccatcgcagaagctggatatgaccatgatctgcgggatgtgccgccttatctgctggagatgcttgccgccagtgggatctgcattggagaactggaggagcgccttatgctggaggataccgtttatggagcatgaaatcttcctctacccctactccaaggcagaggccggaaggcgtggggagttggacaggtgggaggagagcttccgggcaaatgtttcctgcgccagagagattgaggcggctattcgcggttattccaatgtcgatggaatacttcagccgggggctgcccaaagcattttgaatcaatggggcttcaaacggaccaatttcgtccttgccaatacactccaacagttgggtcctatcaaggatcggctcagcgaggcgaaccggaactggcagtgtggggcatatatcccacaggatggcacaaaccggtactttgcagtagacaccgctttgatctgcatggaccagttcatcggtcaggtccgggatgcgtataagcagttggagctgctggggtctgagcactgtgaaaccggttcctatgaaaagctggactatgagggccgggtcctgatcctttccccgaacaccctcaaggaaagttattggaaccagcgaaaccagctctggctggcccatgacggcttcggctgtactcctggcgccatcgggcgcagtatccgctgcacctgtctgggtgatggagaggaaactcgctggaatcggacagatttcattggtgtgctgaaggaggaatgcctcccccaatgggcggcagaggccctgagtaagctgattgaggacaaggagcaatcccatacccaaggagggatgacgatgcagtaaaggaggaatgccgccatgcggagtgtagaaattaggaatggccgcctgttctattatggcagcgcagtgggctatctggagggggatggcatcacagcagaccccatgttccgccgtgaggatttggaaaggtggctggagcgtaaaaatctgccggtccgctgggtggatggagtgtacgaccggctggccagcggggggcccattcaaaacgcccggcccctcaagtccctgcggatttggcaactcaagccagatacccccatcgaaatgcgcttcattgggctggagcgaatggccagagaattcgatggccccaacccaagccaatatcgcattgcttatgatgggcaggctgagagccaggagctggaagacatctggaacaagttctgccgcaggaccctgcccggaggagagcgcccgcttgccatctcagatgtgatcgagctttatgatactgatgaaagcgcattctactatgtggacaagcgggagattgtccacgtggacttcactccagccctccgggaaaatgtgaccacaccagagccgtccagaaaggatggatcagatcaaagactgtttcaaaagctggaacaggagtaccttgcttatttggaaccgctgcgctccgccgccccatcggagcttctggaaaaggctggcgagattgccgatacacaggcagtgtatcgctgcctgtgtgaaaacactggcctgtcaacagaacagaaggaaaagctggccacattggaacagccactccaggccatccgggatcgctggcgccagacgcatcctaccccagagccggagctgctggaggcttgtgaggcgcttacaacctcacagcagcagtctgaggaaacacccgcgctttccatgaccctatgattccagggcagccgtgggctgtccattttttataaggaggaacgctacatgaagtatctgaaaaacgctgtccattccatgaaagagctgcctgtttctctccgcgccgccctgtccaatcgcagcggagagggttatgtggacaccgccgtgaagattctgatggcggtagtcatcggtgctctggtgctggctgggctgtacgccctgtttgacgacaccgttatgcccaccctgacccggcgcatccaggagatgtttaactacgccggctgatcccggccagaaaaagaaaggagcagcgtatgtcgaaaaccgtacagaagtctggcgcccagcctgctgtccggcaggacagccacgccgtctatcccactcattacgcagtgaaaatccactccctgcgcctggagggaagctgccgtgccaccgcctcggtcaacatcaacggctgctttgccgtccgaggcatcaaggtcatggacagctccaaggggctgtttgtctccatgcccagctacagggctggaaacggcgagtacaaggatatctgtttttcctgcacaaaagaggccaggatggagtttgattcggctgttctggatgcctaccagcaggctcttgtgcaggcccaggcccagagccagagaggtctggaagctccagaccctacccaggggccggcgtatgatgccagccctgccgtgaatatgtgaccgcagaataaggaggaaaataccatgaagaatcggatgaataagctggcaggcaagatgaacagcataatgatccatgcccatgctgccctggaggacagcagaggtgagggctatgtggatactgctgtgaagatcctgatggcggtggtcatcggcgctctggtgctggctggcctgtatgcgctgtttggcgatgtggtcatgcccaccctgacggagcgaatccaggagatgtttgattatgccggataatcctctatggatgttccggccattcctctcacccgcgccgctgccactggaagtcatctcacaactgcaggaaccaatgaaagccctccaaatgtggctgtttttctccctgcttttggttggtgccatcttcgactgccagaaacgcctgatcccaaatacaatctgtgccctgattaccatagtggggctgctggtctttcatccggcccagttgatgggcccgctggcggccttgcctctgttggctgcggctatgcataagcccggttccataggcggcggtgacatcaagttcaccgccgcctccggctttgtactgggaatcacggccggctcgtggggcatggcgcttggccttacccttgccgcactgttttatgcaatcaactggagcacacagaagttccgcagaagaaagtgcgcggcgcccagccagacagctttgcctctggcgccgtttctttcccttggatttgctatcatttacattttgaattatggaggaacgctatgaagaagctgaataaaacggtcattctcaccatcaccggcattgccttgcccttgggggctgccgctatcctgatttccgggctgcgtaagcgccgccgctgcaagtggaccagcgcctgaccgggcgggcattctttccgccattcccataacaaatcatgactgaggaggacctgccaattatgagtctgttcaaaaatcgaaccgttgtcggcgttatctgcatcctgctctctctggtaatctgctttggtatgacgcctcttttcaataggagtgtcagccagaaagaacagatcatccgggtaactcagcccattctggctggtgaggagatcactgccgatatggtgcagactgtagaagtaggcggctataacctgcctgaaaatgtaatccgcctgaaggaaaatgccgtgggaaagtttgccaccgctgacctggttgcgggcgactatatcatcaacaccaaggtatctgacgaacctgccgctgacaacgcctacctgtacaatctggatggaagccagcaggccatgtccatcaccatcaagagttttgccactggtctgtccggcaagctgcagagcggagatattgtttccgtggtggctccggatttcaaaaaacagggccagaccgttattccacccgaacttaaatatgtagaggtcatcggtgtcactgcctcctccggatatgacgccaataccggcgaggcaccctccgaagaagatgagcgggagctgccctccacagtgacactgctggtttccccagagcagagccgcgtgctggcggagctggaggctgacggcaagctgcacctgaccttggtctatcgcgggtcccgtgaaaatgccgaccggttcctggcggtacagaatgaggtgattgccacgctgtatccccctgagcctgccggagaggactcctccagcgacagtgcgcagcctgacactacagaaacggaggatacagaggctccggctggatctacagatgaaagcgaggcttcctgatgctgaattttaagaaaaacggtattttctcccgctctaccagcgaggaaaccacagccccggaacttcaggggggcggcgtagttgccgtctggggcagccccggcagcggcaagaccaccatggcggtgaagatggccaaatatctggcagacaaaaagagaaatgttgtcctgctcctgtgtgatatgaccgcccccatgctgccctgtatctgcccggcatcggaactggagtgtgagcggtcgctgggaagcgtactggccgctgcccatgtgaccgaaaatctggtcaagaataatctcgtcacccacaaaaggctggggtacctgaccattctggggatgctcaagggcgaaaacgagtacacctatcctccctatggtgaggcgcaggccagagaactcattgattgcttgcgtgaagtcgccccctatgtggtgatcgactgcggcagctacattgccaatgacatcctctccgctgtggcgctgatggaggcagactccgtcttgcggctggccaatgcggacctcaagagcatcagctatctctccagccagcttcctctgctgaaagacgccaagtgggatacggataaacagtacaaaatcgcggccaatgtgaagccccaacaggccggggagcagatcgggcaggcgctgggcaatgtggccttcacattgtcccactcagaggaattggaggcccagttcctcgcaggaatccttctctctgacctgactatgaaggagagcagaggctttcgcaaggaaatcgagcaggtatgccgggaggtattttcatgttaggacagaagcgaaacgattctctgtttggttccggcaaccgcaccattgaggccccgcagcctgttttggaggagcaggaggctgctttggagggagctcctctggatgaggcggttcagccgccctctgaggcccagaccccggcgacagcattcaccgatgcagatgacctgccccggcgtaccatcgccacggaagccgctgctggccagaggggccactccctgttcttcacaccggagaatgagagcagggatttcagttctgtgctgcaggatgttcaggaatatatctccggcaaatattccaccctcatcacagatggcgtgggagcggataccaaggagcaaatcaagcgatacatcagcaaatatgtccaggatcggcgcattgccgtcagggatttgtccggggaacagctggtggatgccctctacaccgagatggccgagtttggctttctcaccaagtacatcttcggctctggtattgaggagatcaatatcaattcctggcgtgatattgaagttttgtattccagcggccagatggtcaagctggaggaacactttgacagtcccgaccatgccatcaatgtgatccgcaggatgctccatgtttcgggtatggtgctggacaacgccagccccgccgtactgggccacctctccaaaaatatccgtatcgccgtactcaagactccgctggtggatgaggatgtgggagtctgcgcctctatccgaatcgtcaacccgcagaatatgcagaaggaggatttcgtccggggcggcactgccacaggccctatgctggacttcctttccgcctgcctgcggtatggcgtctcggtctgtgtggcgggggcaaccggctctggaaaaaccacggtggccggttggctgctcaccacgattcccgaccataagcgcatcttcaccattgaaaatggctcccgtgagctggacctggtgcgggagaaaaatggccgggtcaccaacagtgtcattcacaccatcacccgtgagtcagagaatgccaagcagagcgtggaccaggatatgctgctggacatggccctgcggtatcatcctgacattatctgtgtgggtgagatgcgttcagcagaggcatacgcagcgcaggaagcagcccgcaccggtcacggtgtactgaccaccatccactccaacagctcgcaggccacctggcggcgtatggtcaccctgtgcaagagaaagcatgagatggctgatgatactcttatggatctggtcaccgaggcgtttcctgtgacggtatttgccaaacagctggaggacaaatccagaaagatcatggaaatcatggagtgtgaaaccctcccggatggctcccgccaatacaataccctctatcggttccggatcacggaaaaccggctggaggatgggaagttccacattgatggcgtccacgaagcagtgtctccaatctctgagagcctgcaaaaacggtttgtggagaacgggatgcctcagcaggagctggaccggctgatggatagttttgagcagaaggcgcccgctgagtccagcccccacgctgaaggcagcgcagcagcacagaccgtaaccgccaccgacgaaaatacgctccaggaaggaggcaaaactgtatgaccagtatccaactgttcgcctgcatcggcatggtcacaggcttttttatcctgctgcgcctgtcgccgatggaattcaccgacggagtgttccgcagcctgaccagccggcccaagagcctcaaggatgagattaacgaactcacccatcgcaaaaagaaatcattcctgcgccgtgagattgccgacacccagaacatcctcaaaatgaccgggcgtgagcctaagtttccagccatttgcgccatgtccctcctgctttttgtagtgggggcctctgccgccattatgatggggaacttctttcttgtcccggtgatggctgtgggtatgatgttcgtaccgttctggttcatcaagctgacagcttcctactacaagaagaacattgccgccgagctggaaacagctctatccatcattaccacagcctatctgcgcaacgaggacatccagacggcggtagaggaaaacctggagtacctgaacccacctgtaaaaagcgtgtttgccgagtttctggcccgaatccaactggtggacccggatgtagatgccgccctgcaggacatgggtaccaaaatcgacaatgcggtgtttcgggaatgggtggcggcacttctggcctgccagcacgatcgcggccttaaaacaattctcacgcccattgtggcaaagctctccgacatgcgcatcgtcaacggcgagctggaaaacatggtgtttgaaccccgcaaggaattcatcatcatgcaggtgctggtggtcggaaatatccccttgctctattttttgaacagggactggttcaacacgctgatgcatactgccatgggccaaatcatcctggcggtctgtgccggggtgattttcgtttctacggcatttgttatcaagctgacacagcccattgaataccggaggtgacagacatggctgttttgattttcgtattcggcgctctgttggctctgggcctgttcttcattgcggcggattttctgaagctcccgcgcctcgccacccagagggccatgctttctgttggccgccaggaaaaaaagcaggccaggagcatggaagccttcctgatgggctgggctgtcaagctggccccccacatccacatggatgaatataagagaagccgacttaaaaacaccttgaatgccgcaggcatggggatgactcctgaagtttactcgtcctttgccatcctgaaggcagctgttatcctgctgggcgttatcccatgcctgctggtactgcccttgttggcgcctgtgattttgtttctgggtattgccgtttatttcaaggagattagacgggcagatgaaaggttgagtgaaaaacggggcgaggtggaggccgagctgccccggtttgtggccactatcactcaggagttggccgccagccgggatgtgctgagcatggtggagtcctataagcgcaatgcaggcccgacctttgccgcagagctggacattctcaccgcagatatgcgctccggctcttatgaggccgcgctgacccggtttgaggcgaggttcaattcacccctcctatcggatgttatccggggactgatcggcgtactgcggggcgacaacggcgtcgcctacttccagatgctcagtcatgacatgaaacagctggagcttcaaaggctgaaagcccaggccatgaagatcccgcccaagatccgggtgttctcgttcctgatgctgatgtgttttctgatgacctatctggccatcattgtctatgagatcatcacttccctgggcgggatgttttagagaggaggatgcctgtggactaccacaaggaactgaaaaagaaactgtcggccagctatgaacggcaggtcaagcagtggatggcgtccgatcccgcccaactcattgcggcggcggaagatatcgccgccatccgcttcatccatgaaaacctggttgatacgattagtgatgaagacgcttccttccttctgactctggatgaccccctttgggatgtgagcagcaaatgggttgaggagaacggatctgacatggtacatgacgatgatatccatcactgtatctggtcattgtgggaagaatgcacggacggccagacacaaaaagaagatggtatttaccagctgatcagcaacgcggaaaatgagatgaaagaatatgctcacaaggtaaaacagctgtctgctgataaaatttatcagcactctgcagaaaccgcagccaaagaaaatttgctctgctctattattcatgacagctatgacctggacgatgcggacttggccaaaatccttcaacaggaggaaccgctggatacactgtatcagtttcttctgggcggaaaaaccgacctgtcatcggaaagctccatttcaagcattttgaatgaatataatgctcaatgtcaggaggaaaccgcaaccatggacacgggggtgacgctgtgctgaaaaagatccttagatcaaagcgcggcgagggatatctggatgtgtgtatccttgtcctctgcgctatgctggtcattgcgctggcggtgcgggtcttcccggtatttgttgccaaacagcagctggacacctttgccaccgagctgatccgtgaggcggagatcgccgggcgggtaggctctgaaaccgaccggcgggaacaagcactgcgggagcagactgggcttaaccccgatatttcatggagccgtaccgggcgtattcagctcaaccaagaggtggccgttacagtcacctatgaaaccaacattggcctgttcagcggctttgggagctttcccattacacttcgggcggatgctacagggaaatcggaggtgtattggaaatgaccaggctgcgagaaatcctgcgggaccgaaaaggaaacggcttcccattggccatcgccatcacactggcgctggtcatcatcttctgcggcatcagcgagtacatccgccttctgatcatagcccagggggtgcgagacgcaatgcagactgcggtgatctccaccgtcaatgacaactatgacgatgtgtatcatggtgtccgggaaggctactctggggggtatcagccgatggccggagattttgaggaatctctggactatggtgatatttatggtagactggaggaggtactgggcctgagctatcagggtgggacccgtgtcaaatttaccgaagacggtaaaaccgagtttcgggtgtggggactggatgtggatattgaaaacgcacctctggctggcggggacagggccggaaaccggttcgttgccaattgcgaaatcgaactggaggtacctgtttcctttggaggcagactgcttccagccatgcggatcaccgtggctaccagtgccggttatacgccgaggttttagcagttttcaaaaagttttctattgtccccatagacttctgaaacctcttgtggtagggtgtgccttgaacaaggaagttctccacaagaggctttggtaaaacaaggaggtatcaaccatgaaaaatgcgaccaagaaatggctgattgtggcgggaggtctggccgcctgcgctgctctggtgttcatcatagctggtcagtttgaaaagaagccagtcaatgacaccctgcctccccccagcagctcctcccagggcggtgtgatggtagatgagccggacagcagcattagtccagaaaaggatgatccggagattacggtgaagcctgagaccccggatacttcatccacccctgaaaccgggaacagcggcagcggggccgtggcctcgggcaccgagcagacgatccagggggatccagaaaaaccggaatatgatgatgaggcactgaaggatccgactcaaaagccggatgggaccccggtagagggaaagccagatgcggaagatcatgatacggtggaaccgcctcctccgcccccgtccaccaacaccagcggtggccttcctggttttgataatgttccaaatggcggtgccaatcatgtaaccgaagcagatgatatgtacgagaatggaaataaaatcggcatcatgggctgatctccagcctatcaaaaagcacggcggtcgccgtgctttttgctttgccggaaaggaggatgcatgaaacgaatctggagcattctgcttacgataaccgtggcactcacgctgctatgtcccatgaccgcctatgccgccactggcgagggcaatattgacggtggtggcggtaacttgggggacgccaccagccacggcagctggaatccgggcaacgaaggcgttcgggtgaccattgtccggtccgatgaccatgcagtggtatctactcctattgatttgacaaacagggcgccagctgcctcgatctatcattttgggaaggtcagcaagcttcaatataccaacggggctgcattatcccctgtgcagggaagctatacctgcattaaaccaactcaagccgttccacgaattattagcactaatggccgaaataacatcgaagccattaaaagttactttacggatgagcaggtgattcgggctattgccaattatagtggcatggacttcgatactctcataggcggggagtataagatccttctggaacccattgcttattataagtttgagggagtcatgatagccactactgcgaccgaagcggtcctctatgatgaaatcgtgggaggccagctccgctattggatggggtcgctgaccgccaaaaaccttccgctgtccatgttcctggaaacgccggatcttggctatccggcatggtccggagcgaccaacaaaaacgcctccaatgcggatatcaagtcttcgctggggcttggtatcgtgcggttcgaggagcagccggaggatcccgtcatcaccatctatgactacgaataccgggtcaacaccgaggttatcactgcggtggatgtaagcggcggccaaagcgacccggataaccctgcccgtgtgacctttaccatcgatggccgggactatcatgtggacaatgtctattatccggagggggattcccagctggcatgggtgcgctggacgacaccggacactccccaggatatggtcatcacggtccgggtgtccggccctggaaacgcacaagggacgatcaactgcaaaatcgtaggcctggaccagaacccccctcccaatccagtggcagatgaccggaacgactccttcactccttcatccatccccagccgggagcaaaaaacctccaactactggacgatctggcgtccctggtggtatgagtattgggtatggcatggggatgatgaggatggctattggtgtgatcacggctggtgggagtttgatctggaccgttatagtgccagcctttccgccaccatgcgcatcacaccagacaataagaatcccactgctggcagccgaagcatgaaatcaggatacggggtcaatcagctggtcaccgccgatgtgagcagcacccagagttcagccaccactccggcccagaatgcagtcagctacttctctgagttcaactatgagatgttctggagattgctggagcggatggacggcggctacaatacccgatttgagtttcagaaaaacgagtacagtacctaccggggccgcacacattttacccctatctggtatccgaatggctcgtatactgtgaacacctggctcatcgactgctggacgccagccggaatgctgtccatgaacctaagcgactcactcacgatccggggcagtctctgggatgactggcacatcgccccactggaaccgtaacagaccaagataaatcactgaaaagacaggccgtgggatctccttcttgccgcctgcatagaaatcaagccgcggggacgatctctgcggttctttcttttcgcaaaaagaaaggcggtttatatgaaaaagtgcaagaaactccttggcgttctcctgactgttttcctgctgacctgcctgttcagcaccacggcccttgctgcgggaaccggtgatgtagcgggagccatcgagggaacctggtcggatgcctctgagcagatcaagcaggtggtagacaatgtggttttcccggtcatcgacctgatcctggctgtattcttctttggaaagctgggaatggcttattttgattaccgcaagcatggccagtttgaatggacagctcccgccattctctttgcctgtcttgtgtttacactgactgctccgctgtatatctggacgattctgggaatgtaagctgaaccttggccggaaaactcaatatagaccttgacagtgcgaaaggagtgtatgtcaatgaacttttttgagcaggagctgcggaaaatcataggccagtccactgcggccgctgatgcttcctatgtgggacggtcctgttttgtcaggctcaaccctgacctgcgggcaaagctgacctttatcactatggggatcacctctcactatgaggcactgaagatgacgatcctcaaccggaaagagggagaggtggacaatacagtcctccggttctctgacttgctgggaaaaaagcaggtgatgaaccccaacttcaaaagcgggatcttcccttatatctgggatgaccacggcaaccccatgtggtatgtctaccagctgaaacaggaggactaccagctgcttgcggaaagcgtggatgaatacctgcaggtgttccagtccccaaactttgcagagccccccggacagcagatgtactaatcagccagaaaagaaaatcatcacagggccgagctggacacatggccctgcttttcttttggccattgatagaaatacagctcgccttcaactgaaaggggtgagaaaaccagatgtttatatgggattttgtgctgggcgacattatggatcaggtcatcgactgggtctatgcccagcttgtaggcttctttgggaattttttctcccaaatgggcaatatgggcgttgaactgtttgaaatgagctgggtacagtccatcgtcctctttttttcttatttggcctgggcgctttatgccgtggggctggtggtggctgtattcgagtgcggtatagagtatcagaccggccgggccagcgtaaaggacactgctctgggcgctatcaaaggctttatggctgtcggctgctttacacttgttccggtggaactgtataagctggcggtcgacctacaggccggtctcaccaacgggcttaccggatatgggagcatcgatgcccttgcaacggggatcacggatgccctgagtgccggaaatgttggcagtatcgatgcctccggtgtcttcggtgggctgacctctgtgattaccagccccatcatggctctatttttgatcatcatgatggggtatgccatcgtcaaatgctttttcagcaacttaaagcgcggcggtatcctgctgatccaaattgctgtggggtcgctctatatgttttccatcccccgcggatacacggatgggtttatacagtggtgcaagcaaatcatcggtttgtgcctgaccaccttcctgcaggcaacgattctgaccgccggcctgttggtgctgaaagaccacgccctgctgggacttggcctcatgctctcagccggcgaggttccaaggatctgcggagcctttggcctggatacctctacccgcgccaacattatgtcggccgtttatgcagcgcagacagcaatcaataccacccgtacagtaatccaaactgtagcggccaagtagtcaaatgcagcctcacaattcagaaaaggagaaccgtatgaaaaacaagacattggaaacaagtttgaaacccggcgccattcagacatccgcctttaaaaaaagctaactcttgggagcctcttcgatgggatcggcgggtttcccctggcaggccttcacaatggcattgagccggtatgggccagtgaaatcgaaacattccccatagaggtgaccagggaacggtttcccgatatgctccatgtcggggacatcacaaaactgaacggcaatgaactgcccccggtggatatcatcaccgggggttcgccatgt

SEQ ID NO: 4 - DNA, 1119700 bp, Intestinicoccus colisanans
  source 1..1119700: mol_type = genomic DNA
ttggcacgggctgcctccgcagataatatccacaggcggcagatacgcgccgctcagctttgtaatgtcccccatctgctccatgcggggaaaacggatctttgataccagtatggggaacggttcgatctcgctggcccagatcggctcgatgccataccgcaccgaagccagaggaaagccggagattccatcgaacaggctccccatcgtaagtttccgtgttggctgagtcattttatatacacctctttacttgatcgccgcggcgatggttcttgtcacattcaccgcggactgcgccgtatacacggcgctcgtaatattggcctttgttgtggtgtccagaccgaagctgccggcaatgcggggcacttcaccggcggagagcatgagccccacgcccatcagtgcgtgatccttgaacaccataagccccgcaacgaggatggtggactggaggaaggccgtcaggcacaagccgatgacctgccgcatccagcccataaagccgtccaaatagccccgtgggacactgaacatataaagactgcccaccgcaatttgaatgagtaaaatgcccccgcgtttcagattggcgaaaaacaccttcagcaccgcgtagcccatgaggatcacgcaaaagagaagcatgatggggctggtgatgatgccaaggccgaagtgggagctgttcaccacatctgcaagtgtctgtatctcgctgagttcggtgatgatgtcctgtcccacctcaccaatgctccgtccatagccggtaagccccgcggaaaaggtaccctgcagcgacacggatagggcgtagagccggacggggacaacggtaaacaggctcaccgccagaaagcccttgatgatattcatcccgcactgctggagattccccctgccggtggagtattcaatgccgcactcaaaggcgcagactaccacgctgacggtaaacagcgcccacgcaaggcgggagaaaaagagaatgatggcgctgacccattccagctcgaacagctccacgcccatattgcccatgagggcaaagaagttgccgagaaagcctatggcctgcccatagatccagtccatgagctgatccaggactgtcgcggcgacaaaatcccaaataaatatcttcgttcacctccagagacgcaacaaggccgccgccctttcgggcgacggccttgtcgcgataattggtattatgatttgtgggaaaagttctcgtatagggggatgccatcccgcttgattttacgctccattgtcacgccttgtgcgcggcggaagaatgtatcggcacggtatacgagtatatccaaagacatggtttgcagcggcaggagcgcacggcggatcgccttgaccgcatccaccggacgcatggaattttccgggataatgacgcacaaatcgtagtcactatcatcggttggcgtaccataagcacgggagccaaagagataaatcgcctcggctttgactgtctccgtgataacccggcacaccggctccaattctttttgcaaggattccgtctttgctaaatactcgttttctgtcgacatattcatcatcccaaaacagtgatcacttcaaaagacggggatagtctgtcgtgccattgacgatcgcataaatgtaaacggtgtcgccaatcactttgtagaccgccacataggtttttgtcaaaaccagttttcggtatccgtttgcggcaaggatcgggtccggatgcgtttgccccatcagcgggaaatcccgcagacggtttatggtcgttttcatcgtgctgtagatttttcgcgcgtagggagttcctgcctccgtaatgtgatactttacgatctcctcgaagtcgtgttgagcaagtggaagatagaccagtttacttttcgtaggcacggaacagctcctccattctttcgtcaagctcctccggcgtgcagacaggctctccgctcagtctgctgagttccgcagcataaattttgtcgcggtgtcggaacattttttcccgctcctcgtatgctgccatgctcatataaacaccatcatcttcacccttattcgtgatgaagatcggttcaccggatgcctttgccagctcagagatctgcgtgtactcattccgcagggcggaggatggtctgatttgcatagaaagccctccttgtatcaatttcttgatagtattatatcaagataacactttttatgcaagcctatctttgtgaggtgtaaaaggtgactttataggcctacatcattcgccggcaaagcaaccattgtgtcttattcgttgcctctggcaggagagtccggatttgatttttgaatttcttcttcacaaattagatcccaatgatattccagatgtatttcggcgcaatcaagctgaaaatcaggcaggcaaagagaatggcggggccggtccattcaaactggcctcgctgtcggtagtcaaagtacgcgccgccaagtttcacgaagaatgcgatggcgaggatcatatccagcgcagggaacaccaccttctccaccacgctcttgatctgcttggccgcctccgtccatgtctgctccaccgctcccgcaacatccccgcccgcagcgagcgccgaggtgcagcagagaaaggtcagaagcaaaagcgtcaatgtcagaataatcatttttctgtatttcaagaaatctcaacctccttaaaatggggatgccgccccttgcggagcggcatccgttgttagtccttaatagccggtgcgaggcaggggcttgctgggggcatagacacgggtgacccagcgggaggtcgccatgatccactgcccgttgtagactccgcccgcatccgacgtgttgacgaactgcgtaccaccggtgagctttgaaagcaccttgcaatctacgcggggcgcttctacctgacggaagtttgaaggtacgatgccgaacgccgccatgaactccgtcacatactcattggaagcaagtcccagcgccgcaggagaggcatccaagacatagtttttggatgtgctcaggttatccgccagcgtgcgccaggtatcgccgctgagattggttttgtacacgatcttataatttccaggggtattccatgtgccggtgtagatggtctgaagccgaaccgccttgacgggcaaagtgtctctccaataaaaagactccagcgccgtggtggaattgttggcgatgccggtgaaattgtagcggacgagctgccccggcatgacctccacatagccggttttcttgatggaaacgttggtagacaggctcttgttggtcatgcttgccttgacgatctgaccggcgtactcgatctccacctcaatgggtgtcttatccagcccgtaaaattccgccgccttggattccacgatcttataccgcgccagcggcaaaggcttgctcaccgccaagccgtttttgtccgtcttaatggtatccaccagacggttggtgcgggcgttgtagatctcaaagacggtgttgggaatgggcgtcccggcaggccagccattcatggcgttgtagtccgcgctgaccttcgtcacttggatctggccggtgatgggcgtattcttccactcgatttctgtggtttcgccggactttacatacacggtctttttctgcgtgtcgggaatatatccctcattttccaattcacgcagataaaaacggccagtggtcagattttcaaaacggacataaccgcggtcatcgcttgtctcctgcgagataggattgttgccgctgtcgtagagaatgaaggaaacgccgtagatgccctcgccggtggccgaatcgaccttgtggatcaggataccggagatggctttgttggtcaccgttttggttgtggttttgccatcttccacggcgaaatagatgggggtattgtccagctggaagcccttgcccgcctcggtttccacggcatagtagctgccgctttccagcggcacatacacgcggccgtccgttccggtggtgacggtgtccaccagaccgccatcgctgacacggcggatctcgaaggtggtgttggggatgcgctgggtcttgtccgccgcattcactttcaccagctccagcccgccgatgggagtattataaaaatagagggactgcgtgtcgttgggggtgaccaccacggtctgcgtgcgcgtattctcgtcgatggtgtaaccggagatagatttttcctctgtcaccaccagtgtgccggtgacgcccttgagaatgatctgcccgttttcgtcggtatagtacagaccgttggagctgatttttccgttttcgtcggggacgaactcgccggtagccgtagtgattttgaaggtaacgccctccagcggcgtcttgcggtccagagaggacagcttgttgatgatgagcgcgccctgtcgctcattccagaaggtcatgcgctggggagactggctctggtcgatcttgatgctctgcggtgtcccgtccaacacgaatccatccacagatttgacctcttttgcggtaacagtcatgccgtcggtcagaccctcaatgacgatctggcctgcagcgtcggtggtatagtagccgttgttggggccgactaccgcgccggaggagtctgtcacaagaaactgtaccccggcaagcggttcatttttcgtgccggaaatgtatttctggagaatcaatgttgtagtgggtttgttgtaaaaggtcagcgtctgcgtgtcgttgggattaaccacgacagtctgggtgcggctggcttcgtcgattgtgtagccgggaatcgtcttggtttccgttgctaccacggtgccaacgataccggaaattctgatctcaccggatttgttggtgtaataaatgccgttgctggacagttcgccgttggcgtccgggacaaagctgccatccgcataggtgatcttaaactcgacaccctccagcggctccccgttggggccggagctgaccttgcggatgatgagattaccggcaggctggttcagaaactgcagatgcgccgtttcgccgctcttgatgagcgcgtgctgggggctgtcatccaacaggtagcccgtttttgcccggacttcacgggcgatgaccgtcatgccgggttccagaccatccaccagaatttcgcccgcggcattggtggtgaagcggccgttgtcattgccgagataatggccgctgctgtcggtcaaaaggaactctacgccggagagcggttcgtgcttactgtcattgctcagctttgtaatgagcaggctgccgagcggcgcattgccaaagcggagcgtcaccacatcctgatcctcgccggagatccacaccgtctggggttcgcggtcgatgatgtgatttccgtcgctctcaatctcctggcagatataagtgcctttttcgaggtttgtcacggtgaacgctccgttgggtccggtcagataggtcccgatgactgtaccgccagtaccggaagcgccgccgcctaaatatctcagttcaaatcggcagccctccagtccttttccggtctttgcatcgtacttatacacaacaagggcactgtgaggaacattgtccacggtcacggtcttagaggtattggcttccagatagaactcggtgaccccgctgccctgaatgccgaagcccttgggagcggactcctctaccagtttgtaccagccacggtttacatcggtgatggtgattttaccgtcggaggccgttgtgaacacaccgaggtcgttgatctcgccggtggtggtattatccgagccataatagatatggaatttggcattggagagaggatcaccggtgacgctgtttcgcttcaggatcgtcagggagggtttgaccgcgttgaagaaggtcaccgttctggtgcagcctgcttccagatgtacctcctgcgggatctcagagagaatgacattggaaggcacatttttctccgtgatgcgatagctgcccacggggatggaatcgaggaagatgcgccccgcgctgtccgtcgtggcgctggtggagtagctgccgtcgatctgctcaatgagataggtcacgccctcgataggctctccggtggcaatgtttttcttcaaaatttcgagtcccggcttttcatagtcaacgaagatgacttcggaggtcttgccggggcgcagcgctacggtctgctcggtgtgagacactacataaggctccggcacggattcctcccggacgacatacacatcagcggggatgtctgaaagggttgccgaaccgtccgagccggtggtgacggaggtagaatagctgccggtcacggatttaatggacagcaccgtaccggggatcggtgtgccggtctgcgcatcggtcttgatgatcttcatgctgggcagttcatagttcgtagcggtaacggtatactgcttgtctccatccgtggtgtccacatagacgctgagtggggtggaatctgcgcagtagcctgccggagcttccacttctacaaaagaccataagcctttcgtcacgttattgacttcgataatgccgccgtttttggtcacatcgctgccgacgatctgaccgtcacggtagatgttgaattttgcaccgtccagcccgcgggtcgttccagcagccacctttcgcaaggtaatgtccgcatcgccggcaggaggcgtgggcttatccggcacgggagcatcattcaccaccagtttgcggggcgcatagtaattgaagaagctctggcgtcccttgacgctggactttgcccacaccgcccattttgcggcttcatcctcaacgacagacgcaatgatgcctttggcggcgtactcctcaatctgcttctggaactccgcatcctccttggctttttctttcaacatccagtcggtgtagcccaagtacatttcataggtatcagcgttggcgtagccgccgccatcgatgtcaccatcgccttcgcccttgaaagactggtgatcccatacataggtctgcgcggccatgaacaggctgccggggatgtcacccttatagtccacgatataggtcatcatccacttgaagttttcaagctgctgggcgtccagctcacccatgccgctctgcgccagcgccgttttcaggacagcgtctgcgtccgcgccggtggcagaggtataggtgtaagagttgaggaacgatgccgtaccccagcgatagccatagccgcgatccatgcagtagagcattttgcctgccgccatcggcggcttatagctgtacggcgtaccgtcatggagaagccgcgttgtccagtagtttgtgttgctggtgggcttgatgccggttccggtgctggaagcggcaagtgcagaagtcggaagcagcgtcaataatgtcataatgacaagaaacgccgacatgatccttgttctaagtgttttcaaggttggttcctccttattgtcatttagagataatgaagaagcagaccggtttttctcggtctgcttcacgttgatgttgtttgattttacttggctgccggagtatctacccaacttatggagtagccattccataggaagagctggacgcagtaccagcacgcctcgccgctgtcattgactcctcttgaaagtcccacgccggtttcggcgtaattcttttcgaggagattgtcccggtgtccaccggagaggttccatgaccacacggcggcctcggataccgatttaccctgcagcgcccaatctgcgatgcggtggatattctctcctacatacgggcaatcggtaacagaggtgtttcgtcgtccatccggtctggtatgagagtagacactgctggaggccatctcgtcggcccggacctgcgccgcctgcatgagcttgtcgttgacgcgcagcgcggcagcaccattttcgcgccgcagcgcattggtgcggtcaatgatgtcctgctttgcagcggcaacgtctgtctgcgcaggctgctctacaggctttgtcgtagtggactttaccggtgcttcaccagtgtaaggcttgtccgactcgacctgcacgcatttgctatcgctgtcccagtagatattgaagccgaccgctctgccgatgtcgcgcagcataacatagttatttccgttgatgttgtacgccgtcaggcggacttcctgcccgtctacaaggatgcggttggtggaaagcgtcgctttcagcgattccaccgcctgcgccgcaggagcactcaacgaaagccccagcacaaggccgcagaggacgagtccggtattcttcgctctgttcattgttctgcctccattctaaatgtgtgtggaaatccttctcgcagcttcaccatatcacaggcgatgggcagaagtcgaacagaaccgatctggcaaaacggagaaaaatcaagccttcactgcggtgacgcaccagcgctggtcgcgctgattgcgaacgcaggtgtaaagcgtcagcaggttttcacttgcgtccgcaagaccgctgcggtctgtctcgctgaccttgctgacgtccgtcaccttataggtgcgcgtccccagcttggtcgtcagggtgatcttgtccccgatgttcagcgtgtggatctgcccgaagtagctgttggcgccgcggttgtgggcggcgaggcagacattgccctcccagatggaggtatcttcaaaatgcccaacgcctttggcaagcgtcttgctatccgttccctgatagatcctcacgctcagacccagcgtggggatctcgatcttgccgagggaaccgtttatgtagtagagctcactcgtcacatctgtgaacagcacagcgggctgatagccgttgccgctgctcaccgtactccctggggtaaccacatcgccgttgccgctgatcacggcgccagccgtgggaagggtgcgcggcgcaagattcggcgtcaggtattcgccggtatgcagcgcattcatgctctccgagccaaagacgggcggaatgagcgctgcgttcttgctcacatcttcgttgcgcatggcgccgccatccgccgtgtgaatgacatcgatggaggtattcctgccgaagtcgtaatcgtccggcgcatcgatactgtattccagcgcatacgccggagccgccagagctgctgtcatgcaaaggctcaggcaaagggtgatgatctttttcattcttctgtctcctcctcatctgcattttctcttttgcgttttaccagcagcgcgccgccgacgcccgcgcctgccgcggccacgactccgatggggatgagcacataggaccagcggagcgaggacattgcgccggcggtttttgcaggctctgcgggctggataggcacgccttcgaaaatggcaacatagcgaacgcgatttaatgcgatgcggctcaccgtgccggtatagtccgccgtgacggtgtaacccttgacgtagctgctggtggtgctgccggtgtaggtggcgacggcggtatagcggtctgccacggcataaccgtccatgttggcggtattgtcggtctgccactgaatgtcggagagcgtcaggtttttgccgccgtcctcaatgctcttggggatgtactgtgtatcctgctcggcaagattgggatagctgcgcttgacggaaagctgctttgtagaactgccatagccagacggctcgacctgcacggtgtcaagtcggagtgtcagggttcccataagcccatcgtccgtgatgaactcacgctcctgcggcagcagcgccagcacggattccatatcctttttggcgctctcgatagaaacatgctccgtatgctggcggctctcgttttccggaagctcctgcttcagaagatccgtcagggtgtactgaaagccgtcctgccgaaagtccgagcggggaatgcccgcaggatcgtcttccggactcagatcatagattttcttcagttctgtgccatcgtcgtttcggacgatggaggtgggatagcagaccttggcgtccggtaccgcgggttcaaagtccgccgccagcgcagtgggcgtcagtgccaaagtcaggcacaacgccgcagcgcagagagatagcattcgtttcattttgtgttcctcttttctttatttttatagtgatttttcgtctgttccagcagaaggtcatattcccaaggctccagctctaaggagaggtaggcaccgtctttcgacataccgtctacccggtagcgcaacaccagaggaagctgcctctgctttttcacatcctggggtgagagccaaccagcgccttctacaaaaacagtgcgaatggcggaatcatagtttccttcatagccctgccagagaagcgcctcccgcagctcttcccgcagctttctgcgatggggaacgggaaccaaacgctccggctccaacaggaaacggggatgcaggacttctaagcaaacgtccagcgcatttttcaaagcagcattctttttcgtcaagccgctgcgccggtaatctgccgccagaacgtcctcaccctgggcatcgccaaggaaaaggcgtacacagcggatgagttcataagcgtgggcgtcatccgccatgccaagcacgcggaccccgtccatagggagcgtccggtaatgggtaatggcctccgccagtgcggagaactgtctcacatcccagccgggtcttccggggcggagatcgtccacggtgtaataggtcatgcacattcagacatcctcctcacttcatattcatgccgcccatagtgggggcattggtctgctcctgtgcgttcagctctgccagcttcggctttgcccattccggaagaaacttgtcatccagtacgccaatgaaatcctcccggttccatctggctgtttctccgtccgagaggcaggtggcaaagactgctcgaccactggaatgaggcgcgcatccaaagccgctccgagcatacagaagttggtaatcctgcccccaatactgctcctgcagtgcctccggcgacagcaccagcaccttgccggtgaagtcctgctccgcgcggtcaccgacgcaatgctccgcgccgaacagattcagcgcctgcactgccttgcggtagaaagtgacgaagccatccagcacagccggatggcttcggacaacaaagtcgctgttgtggttgatgtctttggggatgcaggcgcactccacccactgcttgttggcatggccgaagcgcccgtcccacttgagttcgtgcaaagtgttggcaagcacccacgcggtgcgcttgtagccgtattcgtccagcaccggcgtgatgcagttcttctccagatgcattccgtcgaaattctgacggatggtgtcctcgatggcgttgcggcaggcgatgttcgccttgtggctctcccgccagagggaaagctcgttccgatctctcgcctcggcagaggaataggggtagagataggtgtcattcattctgagatctcctccttttccagcaggcggcatacgccctccatccgcacaccggaatcctccagcatggtgcggacatcatcgtccagatcgtcgatgagcacatctgcggcggttttctccgctgcctgcacgatgactctgccctcctctacaaaggactccagcgcggcagtgggcgagatccccgcctccgccagctggcagggcggaatttcaaggccggagcagtgaggttcgtgttcacaggtgccgcacgccgtttccgtcattccggtctccattgccatctggcttcgctccgccagacgggaaatcagctgcggtgcaacggcggagatgagagaaatggttttcagcagctccgccacggtggggtctcccggcagcagcagaatgcagccgctgtcggtatgcaggatcaggtcgctgacgcctgcaaggccggagagctgcaaagcggcgcgagggatggaaagagttttattgttaggatcatggttcaaattgaatttcatgctgttttcctccttggtggatattttggaatatggaccagcttcagctcccattcgcccagaggctcgtcgaataggtttagctggtgggtcatatagggacgcggatcgtagttggtgatgataagttcgccgaaggacgagccctttttctgagacagcgggttgctgcgctggaaagataaaatataccaatcctgatagagcttgcggataaaggggcagtcgttgtaggacagtaccacataactgtcacggtcagttagtacctgccagagccggacatggaatctgcggaaacgtcccagcttcccagcgactcggtagagccgctctgttttgacatagggcggatcggcatagataagactgccttttttatctcgttcccgaatgagctgcaaggcgtttttgttctccagcggcacgtccttcagtcgtgcggacactggcggaaacatttttagaagatgttccacatccattcctttaacgccgaaagatgtgacggttgcgctgaagctgccgcggatggcaaggtaatacgctgccgcccgctttacatcgtaaagcgccagccgttcctgaaagatggggagcagttctcctgcctgttcctccgtaaaacaggagcggtctcccagacactcgatctccgcctgcacattttgaaagtagacctccttatgggcaacaaagtcgcgataatactcgaagagcttgcggccgtgaatgggcaggaatttcagctcccgcagcaaaacattggagcattctttgatgcaagagaacaggttcaccagctcggcatccaagtcgttataaatgtccaatcggtttgggtccggcggcaaagccagcagcacggcgccactgccgccgaacggctccacatactgcttcagcttgggcgggaaaagctgcaggatgtagggtgcgatcttctccttgccaccgatccagggaaagggcggcttagccatgtccgacctccttttcttcctgattgcaccttatcccgtcagcacggttttcctgttcaaaacgaaacttcctgcaatgtgccaacagttgttcatcgcgcatgttttctcctttccggggtgatttcccgaaaagaagataaaaaaagaaggggccgatcccctttcggaaaatcggcccctaaaatgatttttaatggcttctgcgtgtcaagatggtattacttcattttcatctccatttcctgggattgttggacaggtgacagcatgggctgatagtccgcgcgatgcagcaggccgtagggtgaaagcactgcattgtcctccttgatgatgtcgcagccgtaggcgtagaggtttacatgggaaatcagcaattccaccgagtggtcatccgtcatgaagtgaagctggtctacggctgtttcctgcggggagctcagctccggcgtgaggatataatcgtccagatgctctgccagaaggatagctgtcccgatgtcctgcacctcgaactgctccagcaatgctttcagctttgggagctgcacctgccggacagggatatccttcactgctttggcaaactcgttgaaggcttctatctccatgggcaggtcggcaaatatggctgcgttggggatgatgccatcatagtcaagcacaacggtattttcccattgcagcgtacccagccgctcctgcgcatcctccagttctttctccgaggcgggaagctccagcgtcaccgtgcgctcatcgccaatgtcgggatgcagtccaagcgtgagtcggaagaggtattccggcttttccggcagttcctttgggcagggtggcacggttgttagctcaccgtcctgcagtacatacaggctgcccacaaaaacgccgttctcgccgcaccgcatcattcttccgatgccggcgaagtccagcatctcgaatacctcgtcggatatgccgtccagatcggggatgaatccgttttccgcgtagaagcggccaagctgggcgtcatccgcggcctccaccacatgatagcagtcggtttttgcgctgaccgccagatcccgcagatcctgcagcgtgatgacgccaccgttggtatcgactttatgctgcacctccatgcgcaggaaaccgtcaaaggcgaccttctgtatctcgtccagcgccgacagaagtgcggcgagatcattaagctcgttgaggctgatttctaacccgtccaaatggggcgcaagatacgcaaaggcatagtagtcttcaatctccatgtacaggatgtcatctgtctgaaggcgtaccttgtccagtgcgtcccacagcacccacggggaggcgggcaagtccagctttgcgtatgcatcgctgttaggattgccctcctttgccagataaacggcaaacaccttcttagccaaacttcatccctcccatcttttgctcatagtaaccggggtctgcgccagggacgccccagccgaacatggaacccgttttcatggcttcctcctgcgcaggggtaacgcccagccgctcgttgttatagtccgctatctcgcggttatgcgcaggatcgtttgtgttccaatcgctgggatagtagccgctctcgccgcgcttgatgcagatgagctcaccggtgccggggagggtggagaagcacagctccggcagaccctccgccagcttgggggcgaacaattcctgctccgtttggatgttccactcgtccgagttccaaaggtggacatacaattcacttccgccatccacaaggatatcccgctgctcaaagccttcgccccagccgtccgaagcctgtccggtgaggtattcctttaaggtttccagctctgtgtccgacaattccccggcgacacggcattccgccacgccccagagctggcgatcacgctcctccgcggcgaagacggcagagtggaccttgcgattgacactgtcggcctcatcataccaatgcatgagaccgcgctcggtttcctccggcatccggtttttcaccagtgccgccatgatctgatcctgatagccgcgcagctcactgccctccagcaatgtgctgctgtcgtcgaaatcgccgtactcgttccgctcatagagatcagcggtcaggggcatatacagcttgagggtggtcagcttgggcggcagcacggtgaagctgtcctcgccgggggcgagcggcagcgtgcggccattgtcccacttcataaaaatttgtcctttatcgtccacgaagtccacctcgccctccgtgccgggaagaatgggatgataagggtcctccatcgaattaagccggatgcgggtgccggggggatactgctccttgataaaattcaccatttttctgtccatcactttatacctcccattgtcatgccctgatcgggcattttttgatattcctccaactgacggggattttcctcgccataaaggtcaaagacgatatcgtccacctgcttgcggacgctgggatcgtcggctaacacttcgtaacggaagcctgtggtcgggcggtacggcaattcctctcggacgcatttgagaaaggcttcggcatcggtaaactcctgtgtatcgccattggcataggtaacgcggcccaccaggggcttgtcccgcgccatgttctgccgttggacagctaaatcgtaagcggtgaggtaaccattgtaatctccaggggacgggttgcagcgcaggcagtagcggtagctctccgtttccacgatgtagccgtagttctgtacatagccgccgtcgattttcccgccgtggtcatagcaaaaacgctccatagcgaagcggcttttcagcacatcttcacggagcttaccaacgatctgctgcaactccgctttgaacgcggggctgttcagttcctccgggccacggggccaccaggtatgccagaactcgtttccgttgcgcccgaagtccatgcggacacagccgacagcgccaaggcgcttattttcttcggggtgctgggcataaaataagcccgcctcctccgggcgggcaggtcggatatgaaatttcatgttctctgcgggataggggagctgatgtgcttcgcagaactcgcggagcgtcatgtcgccttcatcgagaaaaccgagctcatcccgcacatccagccgcccggacttaggcatcgccagcttttccggcatcagcaccgagcctgcgtggttgaccacaacattttcttccatgtaacacagctcgccgggatcatcgtcagagccgcgaatgtcatagcagtaccagcccttcggcacggtatcgcgggcgatacgcccgttggtgaacagcgcgggcttatcaaatacttcaatgtgctggaattcctctgttcttgcgtttacagccattagtcttccttcctttcctttttggtaacggcaaacatactacacatctgctgcaaagtctaccgaaacatttgctgcccctgccgctgctccggaaacggcgggtccaagcggcgcagcaagccgaactctgtttttgtcacgcagtcgttttccatgcagtcctgaccatatttctcaaaatccatgtagccgtccagctcatagatggcttcatcatccagccccagcgtttcctgcaatcgctgctgaccgtaaccgtaagcaccctccgtgatgcgctggtagttgtccagatttcgcagcagctcacaggctccgcgcagcgtatccggccgctcggcctccagcacggcggcgtaggtcaggagcatcccgtccttttgccagatgtcctccaaggcttcggcaaaatcgttgtaatcctccacggcggggcaatccgtatcacggatcagttccccaatgtaaggcaccttgaagcgaatatcacagagcatggcatccgcgaaaacatcaatatcaagataagtcttcaccgcatcgaggtattgctcatcagcggggaggacaagggtgtagtctggctttccattgacgcgcagcgtcatgcggagcatttcatccctgctctcatcccgccaaggctctgccggcgaaaggtagctgcggtcgattgccatatccggtgtcagcaagctgtgggcgttggggacaaaggcactgtaccgggcatagttgtacccctgcgggtcaacaaggaaaccgtcctttccctccgcatcgaggatgagcaggcagtgtctggtgtcaccatcgtgtcggatggcatttttgttctctgcgatgaaatcatagtcagccagcagtgcgcggctgaactgccggaaccgcggacttggcagctcgatgaccttatccacgacacaggggtctgcctcgcacccggtctgcttacacttcagttctgcttgaatgatcatcgtgaaagccctcccagcaccatgtggttgctttgaccaccgttcatcacttcttccatgcgaaaaaagcctttgtaggcaacatagccccggtcagtgaacattccatcctccgcgttcatgcgctccgtgccatacttttcatagtcataaaaagcgtcgagattttcgtcatagtcgaaatgaccggactgctggatcatgtacttgccgtactcggcgggagagtgcgcgccaggggcgaagtcaaagaggtcgaggttttccgcaaggtttttgatctgtgccgcggactttggctctgccagcgtgaccacggcgcccagcttttccatatccgcttttgacaacccatccgttgcctctgccagttcattgaggtcggagagggtttcgtactccatatccaacaggacatccacctcgttggggagttggctgtcctccagccgcaggcggacatcggcgggatctgtgatgcccccgcgaaggagggcgcggtcgatttcctcctgcaccatggggaggaacagccatgtgatgtgttctgtgtcctccggctcggctttggaggtcaccgcaacggtgatggcattcggctcatagtaatagcaggggaagaaccggccatcgtagacctgctctaatttcataccgttgtcgtagaccacaccatagggcgtcaccgtgccgctgccgctttcgatgagctgccgtgcggtttccttgccatccagtttgttcagctcatccacacttgcgctgccgccgtgcaggttcatgtaatggtcgcggccgatggcggcgaggtcggaaaagtcagtgatgaccgtggcttgctggcagcagaaggtcaggttgatgagatccttcagttcaaaaagctccagcttgtgggccatggcctgaaactgcgcggcctcgccggtgtcgaagctttccagccgtttggcgaggtaattcagctcctccacgttgaccgtgagcatttccgtgcgcttgagcacagagaaaaaactatcaaccgccaccaccttgcagtcggccttgaccgcatcgccgatctccaacgccttcagcagttccatgcagtatgtgtactggtcatgcggaatggggaacgggatggtcgccacaccgtattccgggtggttgggattactcaaaactgcgctcatcatgatcattgtcctcctttttttcgttgatctcgttcattcggctccgcaggcaggttccgtccgcgccccagcagagaaaaccgtggcggggataggggcagtccttgcactccggggaatggctgcaaacaggctccggcagcggctcctgctgaaagccggggatatgcggaagaatgagtttgaagtggatcgtgccatgaatttccatcatcttttcctcctaaaataaaaaatgccggacatttctgtccggcccgcgtggatacctatttcattgtcatgccgctctgttccggcgcgtctcgctgccgcagagcatccgtgggcagcagtccgccgacctgctccatcaactccgccagttcccgatcccgtccaaatgaaaggctttcgtcctgctcgcggacgaacgccagcgcgcggtagatctccgcaagctgctccggctcaaaaagggcgtctttttgaacaagcccgccgcgcacggtgaagtcgcgtttggcggcgtcatagtcatcctggaaataatgtccgtgatggacgcctttgcggtcgaagtcccactcccaagtcacgaattggacgccgcgttcggtggggtggcccgccagcactgcgtcaccgaagtccgcgaggatacggtagtcaccggtgagatcggtcgccttgagctgaggtgcgtattccagaatcgccatgtattccaaagtcattttagcggtgtcgatcaccacctgcaaagcgtcctgcgctcggatactgtccacgttctcctggcggtacagcacgctgcccttgccggtgatgcggcagaggcgccctttttcccagcagacgggcaggtggtgatcctcgatcggttctaccgtaaaaccgttctgccgcagccgaatggcggtttcttcaaggaaacggagctgtgcgggttcgttctgatcgttcattgtgaagtcctcctcgtaagcaaaaaaataggccggaacatcctaaaaatgctccggccggttgatatattaagttgtgaaatgaaaaagggcgcctatttgatggcttcgacgaaaccaacaaacagacacctgaaagatcgtatgaaattttgaggaaaaatcgctctattctgcgcccgcaaaaagggcgcttctcaggattttacctttgaatctgtgaaagggggagttcgaatctccccagttaccaaaataacgcgaaaatatctttttttctgagtgcggaatttgaaagaaaaaaaggtggcaaccctttggtattctaagcgttgcgcttaaaatatccgaattgttgccaccttatggtacgcccgactggattcgaaccagcggcctttagagtcggagttatcaggccgtcaagttggaaagccttgcggcgcaagggattggttgagattacacaaatttccgccattttgaagaaaaacctcggaagccttgcagggcagggcttccgagatttttcgcggtagtagtcaaatagcagtctgagcacttcacaggtcatgcatctcagatgcagcggctcccgttttcagcacacacaaaccgcatacttcacacgattcccgtactgtgtcgatttgagcagtcccagtttttcaaacttcaacacaaagctgcggatcgtcgcgtaagcggcgttcccgaagtccttttccaactgcttggtggaaaactccgcgtcgccgtaagcggacagaacaaactcccacagtgctttctccttctcagtgacctgtccgtgggacagggcgatctgaaacgccacggtcgtctgtgcggtcggaagcaccccgttcagcttatgatatacattttcgataaaatacgccaaaaacggcgttgcgtccagcataccgctgatggttgcgttctcctccaccagcctataggcatcataataccccttgcggcttttattgatatactcggagagcggcacgaacagcgcagaggaatatccctgctgcaccagataccacaaatgcatcagccgtgccattctgccgttgccgtcaaagtacggatgcagatacgccatgtagaagtggatcagcgccgctttcagcaggtcgttgatctcagaatcctcgcggataaacgcgaccaactctcccatgcgctccggcagcgcctgccagggaaagcccgtatgctccacctttgcgccgatcacatacacgctgtcatgccggtagaaatgaccgggcagcagccgatcctcctcgggtagataggccccgatggccatttcatagagctggtgaatggtctcctcagtgatttgattcgccgggtcgctgatgaactccagtccctttttcatgccgaaaatgcggctttcgctttcgtctgtgggagcaagaccggagaggatcttgcggacgctgtcacaggtgaagtccacctgctcgatggtgaaggtggaaacgatctcctcctccatggccttgacgccgtaaagctgtgtgctgttctgcggcgtcaaaagcaccttggcggctgaaaggcgcacctgtgcaatgctgctcagatagacgatgttctgcccggaaaaatccttgagcggcagcgaatgatagaaaccgtttttcagcagctccgtgaactctttgatgtcggcctgcgggaatttatagccgagttttctcaaatccagaacatttttgtcggacagcatcttggtaaacagcgcagcatccatgaaatcacctccgtcgctgattgcaattagtatcaacaagtatcagtatagcggagtatgccctgaattgcaaggtcgaaatcaggtttttgataatcttcaatgcatctccttactgcctttttccggacgacgaaaaccggaagttctccgtctactatatggagctggctcccggcagccattggcagtcagagccgcatctgcggggtaccaccgagtttgtcacccttttcgccggtgcaatcgaaatcacggctgatcagaaggccatcgtcgttcaggcgggcgaaagcgtccgctttcagggcgacaccacccacgcctaccgcaacatctccgaccaaaccaccattctgcacatgatcctgtataacccgtaaaaaggcgtgagccgctgtattgcagcggctcgcgccttttctttcagccatccaactctgcctcgtgcttgaggatcgcgccggtggcggcgttgatctcgtagctgtactccatgccgccgaacttgaactcgacctcatagacgagcgtgccgtcctcatcgtccagctcgatctccatgtcatacgccttgttctcgctcacgtccgcgtggttcaaggcgatggacttcgccttggcgtgaccgatgtcgccggtgggcacagtaggctttgccgtctcgtcccctacaggggccgtggtcagcaagtccttctgcccgctgagcaccttccccgtgtaggcgtccaccagatactcaaactcaccccatgctgtgtgcagctccacctcgtagtgcgcggggaattcgtccagctcggaatcgacctcagccgtaacggaatcaagcgccgttgtcccggcatactgctccgcggcgtaagcggcggcatccttaccgacgggcatggcgggcgcgcccgcttccgcaaggtccttgagctcctccaccgagagctttgccagcgcgtcaaacttcagcgacgggttgatggcgaggacggagttcaccagcgccgccttgccggtggaaatattgttttcccgggcctgctgctcccgcgccgcatcctgcgtcagcgtctgcgtcaggacggcggccttcgcttcgctggtctgcagcacaccgtccacggcgctggtcagctcccgctggagcttttccgcgcgggctgcatccttgtcctccaccgagatcatgatggcggaggaaatgctgtcgagatagccgtttcgtacgaggctgcccacgatggcgttcaccgccacgtccagctttgcacccttgaggtcagcaccgttgctcatatccgcaaggatggccttggcatcctcgttgagcggggtacagacgagcaccttttcgttcctgctgaccttcagctcgatgctggggttcacatccagcgacaccacggacgccaccgcatgggcctgctgatagaacatgcctccgccgcacagcagcatcaccgcaaggcaggcggctaccagagttgtccattttcgatttaccgttttctttgttgtcatgggaatgaccgttcctttccgcgcttcacagcgggagagaacgccgctcatatcgtccggcgcggtcttttccaccgccgaagccagacgctgctccatcttttcattggtcatcgggcgtcatctccttccagacagcttcgcatcttcttcaatgctctgtgatatttcgacaggacggtaggaagcggcagctccagcagcgccgcgatctcccggtgcttcatacccgtgaccgcgtggagcagcacaacgcgccgctcctcatcgctaaggtttgccaatgcgccttgcagcagcgcgcgctcgtcggcgtccagtccgcactcctgcgcgggaatggcgttccattcctcctcgctgagggcggcatggcgttcctcccgccgcaggcgcatcaggcacaggctgcggcacacggtcagcagccatcccatgggcgagccggtggggcggtactgcgccgcgcagtcccacacctgcacatagacatcctgcgtgagatcctgcgcatcgtgggcgtttttgaggtaggacagcgcaagaccgtacaccgccgtccgcgtgcgctgatacagctccgccagcgcttcacgctccccgccggcaatgtggagcaacaactgctgcagctcgtgtcgatcctctgccggcacatattcggttgtcatcagcatactgagcatgggctttttctcctgtcatccgtgtaatgcacggaaagggcgttttattgcatttggacttaaaaacttttttgatcaagctccgccgagcacctcgtaaacacggacaagcgctgctgtctcacagataaagcgagctgtcagctcccgttccccccccaccacgtcctctgcggcgttgtgtaccgcaatgacatacaccagccacgacaggccgctggcaatgcccgccacctgtatcacccgctgtctggactggaagaacggcagcatcgccgctaacgatgccacgatgggcagtaccgtcactggcgtctcataggtcaccacggcaatcagcagaaatactgccacgatgggtatcgcggtgaccagtttactccagttgaatttctcctgcaataggaaaagcagcagcacggcaatctggaaaaagctgcacagtgcgccggagcgtgcgtggagcagcgtgtagtggatggcgaagatctggttggccaccacctgccacagcaagatggtacgcttgtcatcctgccagtagctgagacccatggcgatcagtgcgccgaaccctatgagctggcaaaatacgttcatccgtcgtcccctttaatgaaaaacgccgcacaccctgtcggatgcgtggcgaaaaatgaaggcaatgctccagaaaaatccacacttattttggattttcattgtaccatgggacagccgtatttgtcaattgcggcaaaggacaacctccaaaagccatgggcttttggagcgagtgtagttgcccgcaggttttgttgtacctgcgttcaacggtatgtagccgaggcccaaggacatttctcctgaagattgttgcaaatctcctgcatcggagctgcatactcccgcaattcttggggcatggaggcaacgccttccacaataatgtgtctttgcaccggttgccaaaacacttctgccaggcaaccctacatggcgtcccaattttctccgaagtagtccagaaacccaaacgtcttgcggatgcgctggtgtaatgtatcgcagtccttgcaaccatcctaacgaatcgtttctcacatagcgcaggactgctcatccattactttcatactcacgcaccgctatactataaggtgatgtcaagcaaactgtaagaccatccgttatgatgagattgctcttaaaaccatatggaattctcatgttttgttcctcctaaaaacaagaattcccatgccatcatctcagtcaggagataaaacatggaaatatagtatcttttctatgtctgttctgcacaattttcaggttcgattcacgttgtattcatatcaaaaaagcaaaagttgcgtataacagatgttatacgcaacttttgtctaatttgtaactacccgcaaccgtagttgtttaggcagagtgatgttcgccagcgtctgaccgtacttggcagtcaggccggtgagaacggtgtaactcggcgtcgcctttgtgatacttgcgccgtgcgtcacggtgagcacgggcaggctgtagttttcgctctctgccgccttggtggtgaaggtcactgtgttggcttcctccacatttgcgctgttgtagacacagctgcctctgacggtaggaaaggtatcgcccgcgttcaccttggcgttgtccttgatctgcaccgtggcggtttcgcaggtgtcctttccgtcataaaccttggtgaaggtgctgccgtggtgaattccagatcagccgcggtcagcgttttcttgccgatggagaaattctcggttttgtccgtaaactcatagttgcccattgccttaacggtcacggaaccggcgttctcaccggcattcttgttttcaccataggtgacggtataatcttgacctactaccagcgtggtctctctgactatcacagttaccgtgggtttgatctgcccgccggtgtaggtcgtgtcaccgctcaacgttaccgtcggctcggtggtgttacgcgcgatggtgaacttccacctctccgctgtcagttcggaggcggtagcatagttcgtgccctcgatcacggcgatcttgacggtgtaggtgcccgcattggtgggattctgcacttccctgccgtcccgaccgaatttgaccgagacatcgcccatgccggtgataccggtgttgggcgcgatggctgcagtctttgctttaccgtaatagattaaatcagtcggagcggtgaagctgaagttctccgccgtgggcgtagctttttcgatgctatactccacactggcggtcttggcattttcaccctcgcccagcgtgatgctggcggtataatcgcccgcgtcggcgggggcggcggtcagagtttcattgccctttttgtaggtgatagtgggtgcggtcacaccgggaatggagcctgtcaccgtggtggcttttctctctttttcatgcagcatgattatacaccgtacgttaacgtgcgatgcaagacctttttacatttcggagagcattttatgaaaaaaggaccgcgacttattttccgccggagagttagcgcgggtgcagggtattacccgccgtgctattctctgttacgaggagcatagcctgatttccgggctttttacttgtagatacaatcaaaaaatgcgtaagtccaaaaacatccggacttacgcatttaactgggtcttttcagagaaggcgaagacgccttttggcgtcctcgctttccagagagaatcgtatttctttgtcctgttggcaggtgccggagattcaaggtggtggtaagaagagcatttgtgttgtgaaggaggtgccgatagatccgggcgcacctgccaacaggaacgaagaaacgcaaaatgagttttacttcgcagccttggcagccttgatggactcgatcagctcggggacgaccttgaacagatcgccgacgataccgtagtcagccacctcgaagatgggggcggtgtcgttcttgttcacggcgatgatgcactcggagtcctgcataccagccttgtgctggatggcgccggagatacccagagcgatgtagaccttgggatggacggtcttgccggtctggccgacctgatggtcagcggagatccagccggcgtccacgcaggcgcgggaggaacccacgacgccgcccaggacctcagccagctcctcggccagcttgatgccgccctccacgtccttggagataccacggccaacggacacgatgaagtcagcgccgatcaggtcaaccagcttcttggcggccttaacggtatccacgacctcggtcttgatgtcagcggcttccagagcgaacgcgggatgcaggatctccacgttcttcttgcactcgcgcttcttcataacgccggggcgaacggtcgccatagcggggcggaagcgggggcaaatgatggacgccatcaggtgaccgccgaaagcgggacgggtcatcttcaggtcgcgggacacatcgtggggctcgcggttgatcatcacggtgcccagcttctcgatgcgctcctcgggcagggtggaagcttccttcaggaagcccttgtagttgggcatgtcgatgtccaggtgggtgcagtccgcgcacagaccggtgtgcaggcgagccgcgcagcggggggccaggtcacggccgatgttggaggcgccgaacagcagcacctcgggcttcagctcctcaacggcctccacgatcaccttggtgtaggcatcggtggtgaagtccttcagcaggggggagttgtacacgtacaccttgtcggcgccgtactcgcccagctcggcggcgatgccgtcaacgttgtcgcccagcaggatgccgcacagctcgacacccagctcattggccagcttccggccctcggagatcagttcgaaggtggtgggcatcatcacgccctgacgctgctcgcagaacacccatacgttcttgaaggcagcggtatcagcactattaaaagccattttcttttctccttccttagatgatgtgcttggcggccaggatgccggccagcttgtcggtggtagccttgtcagcgccctcgagcatcatgcccgcgcccttctgaggaggcgtgaaggaggtcagaatattggtgggagaaccggccagaccgatggtgctcttgtcgatcagggggtgatccttcagggtctcgtaggtcatagtgaccagaggcttgctgtagcactcgaacgcgccgcccacggacaggtaacgcggggtgttcagctccttgatgcaggtgatcatgcagggagtcttgaccttgatggtcatgtagccgtcctccagcatgcgcttgacggtcagggtgtcgccgtccttggtgatctcgccggcataggtgacctggggcagatgcagcttctcagcgatctggggacccacctgtgcggtatcaccgtcgatggcctgacggccagccaggatgatgtcgtccttctcgatgccgtaggtatcgatagcggcagcgatgatctgggaggtagcgtaggtatcggaaccgccgaactcacgggcggtgaccagaacaccctcgtccacgcccatggccatcagctcacgcagcataccctctgcgggaggaggacccatggtgaacgccacgaccttgcagcccagctcgtccttcagggacagggcggcctcgacggcgttcagatcgtcggggttgatgatggtctgcatggacgcacggtccagagtgccatcgggattgacggccaccttaccggaggtatcggggacctgcttaacagttacgagaattttcattttccttttacctcctaccttacttcacgcccagattgctggcgatgaccatgcgctggacctcgctggtgccctcgtagatctcggtgatcttggcatcacgcatcatacgctctaccgggtaatccttggtgtagccatagccgccgaagagctgcaccaccttggtggtggtcttcatggcgtgctcggaggtgaacagcttggccatagccgcctgcttggtgtagcgcttgccctcgcccttggcgatagcggcctgataggtcagcagccgccccgcctcgcagcccagctccatgtcagccagcgtgaactgggtgttctggaacttgctgatgggcttgccgaactggacgcgccccttggtgtagttgatggcctcggccagcgcgccctcggcgatgcccagggactgggcggcgatgccgatacggccgccgtccaaggtcgccatggcgatggagaaacccttgccctctacgcccagcagattctccttgggaacgatgcagtcctggaacacgatctcggcggtggggctgccgtggagtcccagcttttcctcgtgcttgcccacggagaagccggggaagccgctctccacaatgaaggcggagatccccttggtgcccttgctcttgtcggtcatggcgaacaccacgaacacgtcggccacatagccgttggtgatgaatatcttgctgccgttcatcacatagtggtcgccctccagcttcgcctccgtctgtcccttggaggcgtcggagccggcgttgggctccgtcagggcgaacgcgcccacatggtgcccggtggtcagcatgggcaggtacttcgccttctgctcggcggtgccgtaggtcataatggggtcgcagcacagaccattgtgggtcgccacgatgtcaccggtggaggcgcactgcttgctcagctcctcgatgcacagggcacttgccagcgggtcggcacctgcgccgccgtattccttgggcacgcacatacccatgacgcccaacttgaacagcttctcaatgttgtcgcgggggtactcgcaggtgcggtcggtctccgccgcaatgggcttgacttccttttccgtaaactccgccatcatcttgcggatcagctgatgctcacggctcaaattgaaatccatagtcgttctcctattttattccttaaagtgttcggtcacaggggcatccagctgccgctggcggtggccagcagcttgccggtggcggcatcggtcagctccgcccgctggcggatgaggctgcgccccgccttgacgatgtagacggtgaggtatacctccatgccgtagtccacgccccggtggaaggataccgtcatatccgtggtggtggcttcgttgtccccggcggtgaagttcgccaccacgccgaaggcggtgtcgaacatccccgcgatggcgccgccgtggatgccgcccttttcgttgatctgccacgtctgggtgggaaatgcgtaaatgacggtctggttttcgtagtcgcaggacaccagacgcgcccgcattttctcgtcaaagccgccgtcgtgcaggttcagatagtgctccgacttctcctgcaccagctggagccacgcttgctttttatccatgacacgcctttactcctgtatcccggcgatattcttcgccagcttcttcttgccctgaatgttgccctggcgggcgatcatcacccgctgcgcctggggcgagcctgcgccgtgcatggactccgtgcggtagcccacggcggccgcgcccagacacatattctccaggaaccgcatcacccgctggcgatcctccgtgctgacgccctcgtgggtggcgaaatacttattgcagatctcgccgatggtctctccctcgcgtcccaccaccgtggcggacttgaagtccgtctcgctgggcatggtgaccatcagcccgccggcgatgtcctccgccagacgcacgatctcataggggaaccgggtgacgttctgcttacagacgttcgccagcagcaggtcgatctggtagttgcccgccttagtggggcagccctcgcaggagcaggcgatgccgcaggaatacagcgtctcgttgagatgggtcatctcaatgagcttgtccttgatgtggctggccttctccacgccgttgtactcggcagccagtgccgccgcaccgatgaccacgtcgcccacgcccaccttgcagccgccgtagctctggcggtgatagccggcgaaacgctccaccatcataccggcgaactcgtactcgccgttgaggaagatgtactcattggggataaacacgtggtcgaggaccaccagtgcctcctgcccgccgaatttggcgttgcccacgtcgatgcagccgtcctccattttgcgggtgtcacaggactggcggccgtagatcatgtacagcccctcggcgtcggtggggcaggcgaaggacgcggcatagtccttatccgcctcgcccatggcgatggtgggcatgaagatatgccagtggctgttgatggagccggtctggtggcatttcgcgccgcagaccacaatgccgtcgtcgcggcgttccaccacgtggacgtacatatccgggtcggtctgctcatggggtgccttggagcggtcgcccttggggtcggtcatggcaccgtccacggtcagatcgttgtcctgcacgtagacaaggaatttcttgaagttctcgtgatagctcgtgccgcacttctcgtcgatctcgtaggtggtggagtatacggcgttgaaggcgtccatgcccacgcagcgttggaagcaggaggcggtcttttgccccagcagacgctgcattttcaccttcttcaccagatcgtcggcggactggtggaggtgggtgaagcggttgatcttgtggccggtcaggctggaggtggcggtcatcagatcctcgtaccgaggatcctgcgccagcgcgtaggtcatggccacgcagttgatggagggacggatcatggggtgatccacccagttgtcgagcttttcgccgaacatatacacgcgggtgttcagcttacgcagagagtcgatgtactctttcgcggtcatcagtgccattgtcgattcctccttgtactcaatatcaaggtgcctctgcctatgttcttcaatcacaacaggacggagaacacaggcataaggcgtaatgaggctttgtgttaaaattccaggtaatggggcggcataccagggcacacgtcagtggtcagactgtgagatgccatggggtaacgcagtcccgctttccacatagcctccatgccctcgatggcacgcaccagatcgtccggcttaaaggtaacgcgcagctcccactcacccgccgcgccaaacttgcggtcagcaaaggacggaattcctagaccgggcttcccggttaggaatgtatggcaccaggagtcggcacaggtagactcgcccacgaaggtaaagtgcagtttttcatatcccatatactgccatccggcgtagagcatgaaggcctgggctgaacttgtatacagtacgcatacatcaggatcattgatcttacctgcgtccacaggcgagcacaccagcgcataataaccgctggggatacactccagtgcaaggttgtgcgctttggaggattccagttctttgaaccacaccttattaaacatctctccgctgtaccacttttcatctcgctcaaagagtccattaatgccgcggcaataattcgcgtggacgttctcgaacttgcaggcagttgtccagccaaactggtgcgcctgccctaaaactacacagggggggtaatgcttttcatgtacacgtaccttggggatcgacttgaactcttcttccgtcttgacccacttcatgccaacaggtgccgtaccgtaacggatcattttattcaaacgggcaataatgtcgttccaattatactctgccatgtgaatcttcctttcttgtcttaaaatgtaagtttttcttattgttcagttcaacacctcacggggaaacttctggcagaagaatttttcccatgcctcgatcagctcctcgcggaaattgggatgtgcgatatggatcagcgtttgggcccgttcgcggatgcactttccgcgcaaggcggccacgccgtattccgttaccacatagtcgatgtccgtacgcggaagcgttacgggagtaccttcccccaagaagggaacgattttggatttcttaccgccctgcgcggtggactgcagcacgatcagagattttcctccgggagagcgggtggcgccgcgaacaaaatccgtctgtccgccggtgccgctgatctgcagcttaccgacgctttcagaggctgcctgcccgtaaaaatcgatctccacgcaggagtttatcgaaatcatcttgttgttttgggcaatgatggcggcatcgttcacatacgcaccgtccatcagcataaaggaggggttgtcgttgatgaaatcatacagctttcgtgttcccatagcgaaggcagccacggttttcccacggtgaagtgtttttttccggttgttgaccacaccagcttcaatcagctccatcacaccatcggagatcatttcggagtggatgcccagatcatttttttcctgcaggaatttgcaaatcgcgtccggcagactgccgatacccagctgcagggtcgatccgtcttctatcagatctgcgcaatttttgcccagcgccatttccacatcagagatcacaggacgcgggatctcgatcagtgggtcattgcacgggacaaaatattgcacctgactaacgtgcacaaaggtttcgccatggacgcggggcatattggggttgacctgcataatgcggatcgcagcgctgtcaaagcctgcccgctcgtaagtcaggtcgatgcccagtgaacagtagccatgggcgtcaggcggagacatttgtcccacaaacacatctaccttggggagccgattcatcagaatatcggctacctggctgagacaacagggggtcacgtcaataaagccttcggagatgccctgtttggtttttccaccgctggcaaagaaggaattgtggtggaaatggtccttgtattccggccggcaatattccagaccgcccacaccgatcatatggatgatttctacattctgataacggtcagcgtgtgccaaaagggtgcggataatatgcgtcggctctactgcagcatgggagaacacgacggtatcaccactgtggatataggtgatggcttcctcagcggtaaccgtgttttcttgataatgcttattccagttagtcatggtatgcttctccttgttcttacagaaggattgttagcgtagcttagctgatatgacagggcgcggtataaacgggataccgcgccctacctcatgaggagtgaagtcgttctttgccgaaggatggatcagtcttccagtgttttgaaggcatccgccgccagcttctcatccatgggcgggaaaacatacatgccgatcacacagaacagaatgctgacaacaccgccgatgctgcagcacagatataccgagccgatgatcttggcgaaatacaggatcaggaaggatgcgcagcccaaaacagaacccagtgcagctgccttggcagaggggcgcttgctgaaaatgccgatgaccacagggccggccaccgccgacatgataggtccggcagcaccccagagcatggcagtaaggttggcgggcttattaaatgcaatgggtaccgcgatcagaccaataacaaaggtcgaatacttcaggatattcatcgtcgtcttttcgaccttggcatcgtcaatctgaatacccttggcgcggcgggcgggaacaatcgtattcttatacagtgtacagccgaggatagacgacacgtacagcagcacaccgtccacggtggacatcatggccgccataataaccaccaggaacaccgccgcaatgaacttggggaaaacgaggctgacataataaggaacagcgccatccatgccggtgatcacatcgccgatgccttcgggaaccagaacgcgagtataggagcccacaaagactacggagcacatcaggaacatcagcaacggtgccagccagcagaaggtcttgacatccttgtcatttttaaggtaagtggccttgttgataagctgcgggttcagcgcccaccaaaggtgtgccacaaacaggccgaccacgtatatcggtgtgggataacctgcattgttggggttgagacccatggcaaggttgggatcgatctcggccagacgggcaggaacctccgtaatcacgttgccgaagatgaagatgccggaaactgccagaatgacgcccagcacagtcatcatcagaccctgggcaatattggtgtagatatgcgcataggaaccgcccatgcagatgtagatgataataacaatggcggagatcagaacacccatcttataggagatggaggggatcatctggttaatgataatgcctgcgcccaccagctgggaagcgataaacgccacctgtgccagtgaaacgatggccagccacacgcgaaggccctgactgtgatagcggtcagcgatccagtcggccactgtggcggattgtttcatggaattcatgcggcgataacgtctgacgatgatcgccatgataatgccggcgctggtccactgggaagcccagaaccagaagttcgtcaagccataggcgaagccctggccggcgacacccaagaaggtgcccgcgctggcaaatgttgctgcgaaggtaatcgaaacattaaacacgctgacgtcaccgttggacgttgcgtaactggtggagtccgtagcccgcttgctgcccagatagcccagaatgagcatggcaacaatataaatgaccatcagtacaataaagatattcatggttgctctcctttttctttctcattgtctctcacttcttcttgttgggcagcatgatattgataacagcaatcaacacaacccacgcgcacgcctcaaaaatcaaccaatgctccaaaaaattcattgatgtcacctccttctataggtttcaccctgtatagtagcaaaaagcgcgccaattaccgcctataggcaatgattggacgcgcttttccagtttttctgcattttagccagaaataagcaccacgttttagttaaaatgttgacaaatgtttttcttttaggagtggataatttgctttactttccaattgctgcggaaaagcatctcgtcttcaatcggaacgtgccatttttggtgcgatgtgcggcaataatggcacaattatagatgaagcttttcttccgcctgttttagccgccgtgcaaacgttgatgaagacatctgtagccttgcggcggccttgcgaatactcccctcttcctgcaaggcattcgtaagatactgatactcaatatccagcaggatgtcatccaggggccgctcaccgtcggcacagggtacgatatgcccttgcagcaggcacgagaagctgtctcgcgtcagccggtcaccttcgctcataaccacggcttcctccaggcaattctttagttcccgcacattgccgggaaaagaatagctcttcagcacctgaaaagcgtccggcgtcagtgtcttatgaaagccgtatttattgttcagctctgtaatgaaatgctgaatcaaagggaaaatatcatttcttcgctcccgtagcggcggaatctccaacgagacaacgctgagccggtaaaatagatcttcccgaaatgtctgttcacggatcatctgcttcaaatcacggtttgtggcggaaatgacgcggacattaatttttattggcgttgtgccacccacgcgcaaaagctcctgttcctgtaacactcgcagaagctttgcctgcatcagcagcggcaactcgccaatctcatccagaaatatcgtgccgttgtccgcaacctcaaacaatcctcgtttaccagagctgctggcacctgtgaatgcgcctttttcataaccaaatagctcactctcaataaggctggcggatatggccgcacaattcactcggataaagggtcggctgttccgactgctcatgcggtggatatattttgcatactcttccttgccaacgcctgtttcaccagtgatcaggacgctggtatccacctttgccaccttgttagcgcggtaaataagattcagcgtttcagggtcgttggcaataatttccgcctgcggcagcagctcctcctgcatccgcttgatctgatcacgataggtggcggcgactttttgtgattcctccaattgtgcgcgcatccgctcgatctcacagaagtcgcggttgttgctgaccaccatggtcaatacgccgtctgtgaacacaggcgtgctggtggtatacgaagtgcggccactgcggagcagatgctgctctttggtggcgcgctgttttgtttccagcgtcgcaagggtagatgaatctgagatgacggtggataccaggtcgcgaatgttgcgccccagcacatcttcgcggttggtctggctcagctgttcccaggcacgattgaccttgatgatatcgccgttgccgttggttgcaaataaggtgtcagcagagttttcaatgatcgcgttgagttgctggttgatggtacgctcccgtttcaatgctgccagcagctcatcctgatcgggcaaaggccgttccgctgtgagaaaatcgttctggtcgcagatggtgcagcactcatccttcgccataggacactttttgcatcgcatagacggagcctcctgtcgctttgtcttctttttaacagtatcatactcttttacagatttccagcgtgtttttttatttttgaaaaaatttcctattttcctttgagcggaccctgctttgccataaaaacgcacggcgctccaaaacggtgggcgccgtgcaattctctgctgctgccttatttgtgaagccgctgtgtggatggtggtatctgaagctgtgtgcggtattttgcaacggtgcggcgcgagatacaaatcccctccgccgtcagcgcggctgccagcgcttcatcggagatgggctgcccaggcggttcttcggcgataagccgctgtatccgctggtggatggtcacaggggacaaggagccaaacggtccgtgtgcggcaggctgcgtaaacaaactgcgcagcggaataatttttgtccggaacaaaacatatttttcctgtatcgcccgactgactgtggacgggtttacaccaagggctcccgcaacgtcttgtatcgtcatgggctgcaaggactctccgcagaaaaagtcgtactggcgctgtatgatctcggtcagcagacgggtcagcgttctcttgcggttttgcaggcagtcgatcagttcctccgcccgccgaagcttttcttttaagtattccgccgctgccgcatcctctgtttgctgcagcatagcgcggtattgtttgtccatcgaaacacaaggcattgcctgatggttgagctccagtgtgatgtttccgtcctgaaccgtgatcactgcgtccggcaaaatacagccgccgctttccccagtaccatagccctgcgctgggatcgggttcagtgcggtgatggcggcaacagcctccatcagcgtttttttgtccacgcccagccgtctggccagttctggataacgtcgcgctgccagcagttccagaccgttttgtgccacacccagcgttacggcattgaaattctgtccctgtgccaactgcaaaacgagacattcggacagagtgcgtgcgccgactccggtcggctccagcatttgcaccgcgaacagtgcctgctccagcagtgaaacgggaaccgcgagttcctccgccagcacctccaacgggcaatccagatacccgcggctgtcaaggcagtcgatcaaatagctacccaggcggcgtgtctgaggatccacccattttgattgccccagctgttcgtgcagatgctcctgcaaactttggccatgactgtagtcctgcggggcaaaggggacctgcatggagtgagcgccgcggcaaaaaggcacagcatcttctacagctaacgtcacggcatctttatcgccagcggctgtatccgacaataaatcaatggacgacatgtccacatccagcatgggattctccatcgcctcgtcctgcacatgaaggaacagatcataagcggacatctgcaggcattgcagggaatgccgcatgacaggtgccaatacggcttgctgcttctgcgactgctcaaagcgcatatcgacacctccaccttaatcactgttatcgctactcactcgcattataacaaaccggcttttgaaatgcaagcgcaacaaaacacagccgtgtcaggtgccgcagcatcgggcagagagaaccaatgtcttcgatctgaccgcagattagtagtcaaatagtagtctgcgcgcctcgcgggtcatgtaatcggatgcagcggctcccattttcagcatacacgaaccgcatacttcacgcgattcccgtgctgtgtcgatttgagcaaccccagcttttcaagcttcttcttttctgccgcataattaaatcccatatatggttcctccgtattctgaaatttggttggctgcaaatcttagaaacgggtggcgggccgcggcagcagggcatcctatttgcgtttttgttctgagcgtagcttttgttaagaactaatgcgtcatacttgagatatgctccgctatctgcgtttggaaggtgatttaaaacccaatgtctacttccaacccgcaggatggctgtctcatattgacgcgctcaaaatgagcggtgttcttacacacagagagtgcataagacctcctttccggacggaaaggagatccctgttgtaagcatgacaagtctcccgccaatccagccgtttttttatatggccggattaccggaacatatggcaccattagttccaaaatataactacgaatacgacattctctgtttcggcgtctcccgatagaatatagctggaggtgaactgagagtgttcgaaaaagatgaagcaaaaataacggacaagatgggcctgatcttaaaaggaatccggttgcagaaaggtttttcccgtgaaatcatcgcagaacgcgccaaaattggcgtgcggcacttggcggcaatcgaaaatgaacaacgtgcgccaagtatcgaggtgttctgtcggatcgtgcgggctttgggaatctccgctgaccgagtggtttatccagaagatgaggtagaagaatcagaagaggttcagcttgtccggcttattcgcgcctgcgatgtgcgagatcgcgccgcgattaaagccatggtggaggctctgctgtacagcagagaggagacttctcgggcaggtgagacgaatgcctgtgctgtctgattggtcaatttacaaaaaatgaagcagcggcaggatgtatgatccgaccgctgcttcgctgcattcatagggacacagcggagggcgcaaaggacgatattgttgaccttcctttgcacgatccgctgccttctgcagagacataccggcaaacaaacgaacaggtggctcctcttttcctgatcacactgcgtcctgtgcatcatgcgcttttgatggacttcttgaacagagttcctcgactaatcaatgaaatatgtgaggaggattcattctgttaaggagaggccgagtgctctgtcaagcggtgatcgcgctgccgccgcacaggatcgttttaccggttcggtgtatggatcgctcttttctctacattcagcgcggcctcccgcagcgtttcggtgacggtgggatgactatgaatggtagagatcagttcatccaccgtggcctccaaccggatggccagcgcgccctcggaaatgaggtctgtggctcgtggtcctatgatatgcatacccagaatttcgccgtatttcgctccggcgatgagctttaccagaccctctccgccattgaggatcagtgcctttccgttggcactcatggggaacttacccaccttgtatgcgatgcccttggccttgcactgctcctccgtgagtcccacagaggcagcctccggctcaatatagacgcaggtggggttggtggattcatcacagtgcacctcatggccgcagatgttctctgccgccacctcgcccatggcggaggcagtgtgcgccagctgggcatagcccatgacacagtcgccgatggcatacacgccggggacgctagtctccatcttgtcattgaccttgatgcgaccgcggtcgttgtcgagtttaccggcatcgaggtcgagcatggcggtattggctttgcggccgatggccaccagcaccttctccgcctcaaagctgacagtttcaccagccttgtttttgcagatgaccttggcacccacagagctactttccaccgcctgcaccgggcattccagatggaactccatacccatcttcttcatgtgctctacgccgattttggtgaggtcgccgtccagcatgggcagcatgtgatccatggcctccaccacggtgatcttggtaccgaaggcggcataggcgcaggccagctcaaggccgatgacgccgccgccgatgaccaccatggacttcggcagaaccttgagactcaatgcgccggtggagtcgatgcagttggggttttccttcaggccggggatgggaggcgtggagttgacggagccggcggagataataatggcatccgctgtcatttcctcgtgggagccgtccgcctttttgacgctcagctttttgggagcggtaaaagcggcctttccatcgatgacggtgaccttgttcattttcagcaggcttctgacaccgcccgtgagctttttggagatgtcgttcttatgggcgatgacttgggggaaatccacctccacgccggtgaccttcacgccgatgtccttgccctgatttttgatgtcctccaccagctcggcactatggagcaggcacttggttgggatgcagccgatattcaggcaggtgccgcccaaatgctctttctcaatgagcgtgaccatccttcagctcgaaaagctccagcttgtgtgccattgcctgaaactgtgcggcctcgccggtgtcgaagctgtccagccgtttggcgaggtaattcagctcctccacattgaccgtgagcatctccgtgcgcttgaggacagtatagaagctgtcgatcttttccaccttgcagtccgccttgaccgcgtcgccgatctccaacgccgccagcagctccaggcagcgcgcgtactggtcgttggggatagggaacgggatggtcgccacaccatattccgggtggctgggattactgagaaccgcttgaatcatatttgcttctcctttctatttcttccatatctgtgcgcagacagcctccaccccggtgccaacagacaataccgtgggcgggatacgggcatccacggcatctttcgttctcggtgcaaaacaccagctccggcggcatcggcacaaatgccgtgcaggtgcgtttgtctacgctgcgtctgatcccatcgctcatatgttcctcctttcgggtcacgcccgattatttgtcctgaaaatgcaaaagagcgctggttcgatggttctacgaaaccaacaaaccgacgctctaaactttgtgaaactttttatgaaaaaagcccccttttgcgtgggacttcctcgtacaaaagggggcttcatccgattatttcgccagaaaacaggaaaagagaggttcaaatcacgttgaacccctctcagacggcgctgacatccatgcttgaaaccgttgaaaatggggtgtgaaaaaaccggaaaggcttgatgccacgcggttttcaccacagagtcggagttatcaggccgtcaagccggaaagccctgcggcgcaagggcttggttgagattgcacaaatttccgccattttgaagaaaagccacagaatccttgtggggcagggcttccgagatttttcgcggtagtagtcaaatagcagtctggtcaacaaagaattgacatgttcatgtcggctatatggctccgtttactttcggtactcaatcggattatcctcagtttcgtgaatctttcgggcatattccaggagctccgcttcaaaggtacggcatatttccaaatcctgcgtactgcttctcaagctgcgcagcaggtagacgcaccacggctccggctgctcctccagcgtgtagatctgcagcggcatcagccgcgccagctcataggcggagctgacgggaatcagcgcccagtaatctccatgctggagaaaagaccgtacgccggacgcggtattgatctgcacatgacatcggttatcactgccgaaccacttctttctccacaggatcagaccgttgaaatcgccgccgataaagcggacctcccgctccggatccaactcactggggctgatgggatgcggcggcttcggtgactccgcacggcggacgatacacaggggctgccgatcgatacaccggacagccaagcctccctgtagggactcataggacgcgaaaccgaaatccgccagttccttggagaccagatcatacgtgtctttggagtcgcacacctttatctgtatcttcttttccggatgccgttcggtgtattgccgcaagaactcgtccagcagacggtcgtaggtgcttccgttggtggcgatgcgaacgacagaaagcgccttttcttttaccgcctccgtctcctccagtagcagcttccaccgctccgccaccgagatgaactcctccccctgccgcgtcagctccacactgcgctggcccttggagcgcagcaccagctggcagcccatctcctcctccagtgccttcagccggctgctgaccgctgactgggacagatacaggttttccgccgtctttgagatattgcggcagcgcaccaattccagaaagattgtgatatccttatgatccatggcagactctcctcctgtgcggtatgctatcgattttattatatccgtaaagtgcgtaaatggcaatgcaaaaagacccgctgtcgcgggtcttttcgttttgtgcaaaggaaaacataattgctgttatgcgttggccgtctcttccggcttctcaaacctgcggccgattccggtaagaatactcagcaggaagataagcatcagtccccagcagtggaagttataggggataatatccaagaaagagaagttgggatccacgccatcgatggccagcgccacacccagagacaccagcgtgggattgccgtggggcatcagaccggtagcgccgcaggccacgccgtccagaatgttggcgccgcggcagcggtcgatgtggaatgccttggtgatgcggcgcaccagagagccgaagaacacgatggcgatgccgctgccgccggtgacgacggagccgagagcggccgccagatagcagatcagttcaccggagcggggagatttgcagtgcttcatcaagctgacggtcaggccatcgaaggcgccgctgctgttgaggatctccagcagctggaacagcagggtcacatacagcaccagcgtcatcatgccggacataccggccacgatggggccgtcgttggcaaacatcttcgccggtgcaatggtgcccagtaccagattcagcacaataccgctgaggttacagaggatcagggtgcccatgagatcccaacccttacgcataagaatgaccatgagcacagggagtaccagcaggaacagagacttggcggtgctgccgtccagctccagatcagcggggatattggcgtcctgcgtcagacccacaacggcaaagagtaccgcagcaacagcgccggagatagcggcatagggaaaacgggtacgaaccacctgagagatgtccgcctcctgtgtcagggcggatgagatagtggtgtcggaaataggagccagattgtcgccgaagatggcgccggagatgatagcgccgcacatcaggcccatgttgatgcccaaaccgtgggccagcggtaacagcaccggcgcgacagcggccaccgaaccggtggaggtgccgcaggaggtggagatgagcacgcaggtcaggaatgcgatcatgggtatccatccggcattcaggcccaggcgggtgattccccagatcagggcatcaatcaaaccgctttgccgtaggagttgcgccagcataccggccatgatataggccatgatgatggtgcccaacatagggttctgaagtcccttcagcgtgatcttgccgtagtttttcttatccttggccaacaggaagcccagtgccagagcaaagaaggtaatacctgtgaggcgggccaatccgccgccgccgatgatggtgctgacaagcatacccaccagcatgaacaggacaggcagccacacgccgatctttccgccgtagaatcctgattcttttttcataggggaaacctccatttcttttgttctcctctcgtttatttgcaggagcctccactcctgatggtcagctttgctggagcttcagcagcgcgtcggtgatcttctgcgcagcccgctccagatcctcggtagcgttggcaaaggagaagcgcatgcagcaggccatctcctcgccgtaggcgctaccgggcatgcctaccacgcccgcgttctccagcaggtactcacacatttgggtggagtccatgccgccgatatcgaagaatacccatgcgtagaaggccccctccggcttcaggcagcggacgccggggatcttgttcagcgcgccggtgaacatatcgcggcgataggcgtaggtcttgcgcatctgctcggtctcatactcgcagctaaatgcctctacggcgcccttctgcaaaaaaccgctcatgcaggacaggctgtgctgatacagcttataggccacgtcgtaaatcgccttgggtgccgccaaatagcccatgcgccagccggtcatggctgcgctcttggaaaagccgttcatggtggcgacacggtcatggatagagggataggcgcccatgctgatgctctttgccccatcgtagaccaacttctcatacacctcgtcgctgagcatgtacacctgcggatggcgcagcataaaggcctccagaatatcggcctcgtccttgtgaagaatgcgtccggtggggttgttggggtagttgatgatgataaggcgggtcttgtcggtgcaggcggcctccagcgcctcggcggtgatgtgataatcctgtttgtagtccagctttaccttgacggtcacaccgcccgccgcctgaatgatcggctcataggatacccatgagggatccaataccagcacttcgtcaccctcgttgagaattgcctgtaccgccagatagatggcgttcttgccgccgggcgtcaccaagatgcagttggcatcatagtccaagctattctcctcccgcagctttttctgaatggcctgacgtagctctggcagaccggggcccaccacatagtgggtatatccctccgtcaggctgcgaatggccgccatggaaatacggtcaggtgtggcaaagtccggctcaccgcccgccaggccgataacagtgggatcagttttctgcatctccttggcgcgtgccatcagcaccatggaggcagagggcttcatgctttcaatacgatggttcatggtgatctcctccttcttatttcagcttctgtgccatgtcccacagcagactctcagagggcgccttgcggtcaatggcggacacttcggcaataagcttcagcagggatactccctcctcctgtgccaccctgcggaacatgggcaggaacgaagaatgacatccggtaagccccagcatcagctccacagggttcacggccacgcggtagtgatacggctccatagcggggatcaagtcgtcctccagatagtgcaacagaccgtacagatccacctccgacagatagccctccttcttcagggtggcggcggccagttcagtggcgcagttaccggcactgcgggccatacccagcaggccgcagtcgatctcgtcggcaccggctgccacggcagccagcgcgttggcctgagacagccccagattgctgtgaccatgaaagcctacaggaatcgtcacagagtccttcagcgccttgacatattccgtggtctggtcgggaaacatggttccggcagagtccatgatggtaatgcggtctacaccggcgtcctgcaggagttttgcctcctttgccagctccgccgccggaagaacgtaacccttcatcagcgagtagcgacaggtaagtcccgcttcctttacagctgccaccgccttgacagagcctgcgccgtcaccggcatcagcgcccacccgcaggaaatacagacctgcgtcggcagcgccgcgaaccagttctttatccgccagctttgccagcataaacataccgatacgtccacgagacaggtagggctgcaccgcctcgaaatactcctcgtcactgggtgcttgcttagcatccgccttggcgtaagcgccaagacccttgcagttgccgcattcaatatccggaatacctgcctccagcagcgcaccgatgatgctttgggtcaacgaaataggaaaaccatgacccaccacattgccaccgtcgcgcagggtattgtcaaaaagcctgaccataacaatgcctcctcgtttttatctgttgttgataaatgcatgcatattttactgatttacttatagcataatttcaaatatattaaaagttttaatttcctgcaaataatatcacgtattttgatattatcctttggatatgagatagtagtcggagttatcaagccgtcaagccggaaagccctgcagggcaagggtttggttggtgttacacaaatttccgccattctgaagaaaaacctcggaagccttacagggcaagacttccgaggttttttgcggtagtagtcaaatagcagtctgagcacttcacaggtcatgcggctcagatgcagcggctcccgttttcagcacacacaaaccgcatacttcacacgattcccgtactgtgtcgatttgagcagtcccagtttttcaaacttcaacacaaagctgcggatcgtcgcgtaagcggcgttcccgaagtccttttccaactgcttggtggaaaactccgcgtcgccgtaagcggacagaacaaactcccacagtgctttctccttctcagtgacctgtccgtgggacagggcgatctgaaacgccacggtcgtctgtgcggtcggaagcaccccgttcagcttatgatatacattttcgataaaatacgccaaaaacggcgttgcgtccagcataccgctgatggttgcgttctcctccaccagcctataggcatcataataccccttgcggcttttattgatatactcggagagcggcacgaacagcgcagaggaatatccctgctgcaccagataccacaaatgcatcagccgtgccattctgccgttgccgtcaaagtacggatgcagatacgccatgtagaagtggatcagcgccgctttcagcaggtcgttgatctcagaatcctcgcggataaacgcgaccaactctcccatgcgctccggcagcgcctgccagggaaagcccgtatgctccacctttgcgccgatcacatacacgctgtcatgccggtagaaatgaccgggcagcagccgatcctcctcgggtagataggcaccgatggccatttcatagagctggtgaatggtctcctcagtgatttgattcgccgggtcgctgatgaactccagtccctttttcatgccgaaaatgcggctttcgctttcgtctgtgggagcaagaccggagaggatcttgcggacgctgtcacgggtgaagtccacctgctgctcgatggtgaaggtggaaacgatctcctcctccatggccttgacgccgtaaagctgtgtgctgttctgcggcgtcaaaagcaccttggcggctgaaaggcgcacctgtgcaatgctgctcagatagacgatgttctgcccggagaaatccttgagcggcagcgaatgatagaaaccgtttttcagcagctccgtaaactctttgatgtcggcctgcggaaatttatagccgagccttctcaaatccagaatgttcttgtcagacagcatcttggtaaacaatgcggcatccataaaagcacctccactcctgattgcaattagtatcaacaagtatcagtatagtggagtatgccctgaattgcaagagggaaaacggatttgtgatggtcagcaccacaccatccacggagtatgcccatagcgtcactgccctgcatacgcacctggcattcaaatatacgcccagtactctttgctaacgggatatggaggccggagctggagcgttacaccagtctggtacagcaaatcaaggaaaaagccagagagcgtaccgcacttataagagagaaaaaggaactgccttttctccgtatcatctgcagccgggaattgctgttagacttgcagagctgacggaggaattggaggaactgcgcactgaaaatgctctgcttctgcaaaaatttgagcatgtagaggatgcaggcgcgaaagtgttccgcagagatattgccaccatggaggccggtctgaaaaagctggaggcacaggaacagcatcgaaatttctccagaaaatgaaaaagaaatgaccctgagcggtaatcgtgtgattgctcgcatgttttgttatctgggaatcagtgcatttagtcttactcttgttgctcaagcaggacttcggtttctcatgcttgccatgtgtttttctgaaaaaaagtgctaagtcggttgacaccgcagcgtgcttattgtattatagccccaacatcgactcaagtcgattggcaactgcccaagtactttcgccatcccaatacttgaatttatacaaccgtgtaccacaaggacacgcaaccatcctcaaaggagcggttgtgtgtcccttcttatatgcaattgaggagaattgaaattggaattaaaagaattctttgcagcacaccccaaaatcgcactggccttttccggcggtgtggactccgcgtatctgctctatgccgcaaagcagctgggagccgaggtgcgggcgtattatgtgaaaacagcattccagccgcagtttgagttggacgacgccaagcgtttagccgaggcgcttcatgccgacatgaccgtcttactggtggatattctctccgatacgagggtcgccgcaaatcccgccagccgctgttacttttgcaaaaagtcgattttctcgtcgatcctgcacgctgcaagcgcggacggctttaccacgcttatagacggtacaaacgcctcagacgatgcaggagatcgccccggaatgcaggcgttgagggagctgaaggtatattccccgctcagggactgtggactgacaaaggccgacgttcgccgcctgtctaaggaggccggcctgtttacctggaataagcccgcttacgcctgccttgccacccgcatccccgcggaaacgccgatcaccccggaggatctggcgcggaccgagaaggcggaggactacttgttctctctgggttttaccgattttcgcgtccggcagatgggaaacgccgcaaagctccagcttccggatgcacagctggcacatatcgtggaggcacgggaacaaatcgtcgccacgctgaagcagtggtacagcacggttttattggatttggaggttcgagatgaatagtgagatcaggctcattttggaagccgtaaagcgcggagagctgtccgttgacgacgctgcgttaaaaatcaagatcaagcccttcgaggatattggctacgccaaggtcgatctacatcgcaaggttcggcagggcgctgcggaggtcatttacggcgccggaaaaaacgccgagcaaatcagcggcatcgcttctgccatgaggggcagcgggcaggatgtcgttctcattacccggctttcgcccgaaaaagcggagcagatcaaagccgttcactccctcgcctaccacgccgaggcggggatcggtgttataggagagcttcccgctccggacggcatcggcaggatcgtagttgcgaccggcggcaccagcgacattccggtggcagaggaggcctccctgaccgccgaggttcttggcaatcgcgtcacccgcctgtatgatgtgggcgttgccgggctgcaccgtctgctggctcatctggatgacattatgggagccagcgtcatcatcgccatcgcgggcatggaaggcgcgctggccagcgtcatcggaggactggccgactgtccggtgatcgccgtccccaccagcatcggctacggcgcgtcctttcagggactgtccgcattactctctatgctcaactcctgctccagcggcgtttctgtggtaaacattgataacggctttggcgcagggtatctggcaagcatgatcaatcacatggaggcaaaatcatgaaaactctgtatttggattgcggcatgggtgccgcaggcgatatgctgaccgcggcactgttggagctgctgcctgacccggatggctttgtggacgagttgaacgctctcggcattcccggtgtgcagtatcgccgggaggcgtccgtaaagtgcggcatcaccggcacacatatgtctgttacggtaaatggtgtggaagaatccgatcacgcacatgcccatcaccacgaccatgagcatacacatgaacatgagcatacacatgaacatgaacacacgcctcaccagcacagcagcctgcacaggatccggcacataatatccggcctgcatctgcccgaggcggtgcagcacaacgcgaaggccgtctacggacttatcgcagaggcggagagccgcgcccacaatgtccccgtggcggagagccacttccatgaggttggaacgatggacgccgtggcagacgtcgttgccgtttgcctgctgatggatcggctggcgccagaaagggttatcgtctcccccatccatgtgggcagcggtcatgtccactgcgcgcacggcattctgcccgttcccgctcccgccaccgcatatatcctgcagggccttccgatctacggcggcagcgtaaagggcgagctttgcacgcctaccggcgccgcgctcttaaagcattttgccaccgaatttggtgagatgcctgttatgcgtgtcggcgccattggctacggtatgggtaaaaaggacttccccgccgcaaactgcgtgcggagtatgctgggagaagccggcgaatcgtcccacacggtatgtcagctttcctgcaatgtcgacgacatgacggccgaagccatctccttctccatggatcgcctgtttgatgccggagccctggaggtctataccacgcctgccggcatgaaaaaatcccgccccggcacgctgatctgcgccttgtgtccagaagctgcgcgggaggctgtggtggaagccatgctgcgccataccacgaccatcggcattcgggagagcctctgccgccggtatgtgctggagcggcacattgaaagcatcgagacgccctacggggtagtacgccgcaaggattcctgcggatacggtgtcacccgttccaagtacgaatacgacgatctcgcccgcatcgcagaggagcggcgtatcagtctttccgaagtggccgcgctggtggaagccctctgacggcagcgtaaagctccatccccgcagcgcaaggtcaccggcgacataagccggaaacgaacagcaagcaggaggcggccaaatggtcacctcctgcttattgcggcttgttctttactttgcgattttcctcagttcctccaccgtttcacaggcaatctcgcttatggtaagcttcttcgcgccgatcacacggttgctacagcgattaacgggaagaagcagctttacggccttactctgccccacggcagccgccatggccggtgtgacctctcccagcatagaatcggcagatatgatgcccaccggaccgatgatcacatcggcatcacgactggcaacaatgacggggttctccccggtcgcgccgtacatcgctccgcccttcagcatggtgcaggtcgcaatgctgttcgtgccaatggcatacacttcacagtccacatcgctttttacaatggcctcggcaatgctctgcccgagcttaccgccctgcccatcaataatcacaactttcatagtattctccgtcttgtcgggacacttgaccagctcacaatgctctccgctttttgaatgatgacacagttctcgctccacgccagcaactgccggtgtggacgaccgtcatagccttaaaagagcagcggcatttttccagcagacattctccacgatgcgccccagtgcggcaatatctgccggatactggccgccgtccactaacttacccaacttagcgcacaggatacggcggtagtactcatgccgaggaaatgaggtgaatgaccgggaatctgtcagcatacccgcgctgtgggccagtaggccggtttccatcagctcgtccaactgcgcattgatccctcgcagcgtgtcattgaaccaccatgcagcgccgtactgcacctgcggagcgaagttcacagccatggtgctgaaaaccgcgctctccgcggggttaagattgtagaggatcacgcgcggcaatccaccgccgctttccagcttggccaagaaatgccctaatgccgcaggatcactggttgcaccgacgctgtcgccacctgcatcatggccaactgtctccagcaggcgcggcgattgatcgcggatcgggccgagatgcagctgcatgaccatgccccggcggcgatattcctctccaaggaaaagcaaaagctgctcccgcacctcgtcagcgccgccgcgcaggcaggacagcccatggtcggcgaccacgcatccacaggcctgaaaatggtctaatgccacacacagcgcgtgcttcaggccgtctatatccgcgatagcaacgccggttgactctgccagccgcgacagatgcttccgcgcaccgggatgctccggctccagatagcgatccggccgaaaggacggcagcacttcaaaggggatcccgtcatcccggcggatctgctgatgccactccagcgagtccgccggatcatcggtcgtacacagagcacggacattctgctgcttcagcaggctgacggtatcctgctcccgcagcttttcccgcgtttcctcccagatagatggtgcggtttcgggcgtcagtggcgtgtggatgttaaagtaacgctgcagctccagatgcgtccagtggtaaagtgggcagccggccagttgcggcaccacagacgcccacgccaggaacttctcataaccatcggcatcgcctgtgatccgccgctcctctacgccacaggcgcgcatcgcccgccatttataatgatcggtttccagccacagttccgtcagatcacgaaagacacggtgctgggcaatatctctggatgacagatggttgtgatagtcgataatgggatttccttctgcgtgttgatgaaacagcgttttcgccgtttctccatgcagaaggaaatcctggctcataaattcttccataacaccctccttaaaaccgctcccggtttatccacaggcccaacgcaggattcgggataaagtaaacccgctctccgtctaccgtattgtacccgtatcgcagcgtatcgggatcgtactttgccgccatctcgtcataatcagcgctgcggaatccgactgcctcgatctcctctcggaaagcatccctgaccgcataggtgatggtaaagcgcccatcagaggagccgtggatgagatgggccgccgcccccatattgtcccgcagatcctgattctccggcttgttgaattcctccagcgtatgcaggcggcccctatatccgtacttacggatcagcttgtccacctgtggatcctccccaaattttgtaacgccgggtgccagcacgatcagctctccgccatctgccatagccatacgggtgcgatagacagccttgtttcccagccatgtgcttttgaattcaccgggatccagatagaccacgcattttttcagtccctgctctacaaaatcgatatttttctcctgcgacagcttaactgcctcggtcaggcattcgcgtccctccccgataaacaggccatgggtgcggatgctgcctgccggagcagtggtcacggtcagcacgaagagaatggggtgctggcgcaggaaacgctccatcgagtagtcaaacagcttgcgcaccggtgtgtggtccctgcccatcatccgttccatgccgtatactgcgcccaccatgtgacttttattgatcatgtcgctgccgcccacgcctacaaacaggtttttggcatggttggacataccgatgacctcatgcggcaccacctgacccggcgagatgatcaaatcgtactgttcgtccatcacccgccgattgatctccacgctgatcggctcatgccacagcccctccgtgacatcctccagataactgcttggaacctctcccaccttcagcacgtcagtgcgccagttgtggggaatcagcttttcgtagggtacgtcgccgaacatggcaagggcctgttcctctgtcattggctcatgggtacccagtgccggcatgatgtccacctcggcccccatgttttgaagaatatggtagtaggtgttggtgatgaatccggcgttggaatgataccgcgtaaaatccggtggaaggatcagcacacgtcgtggatggcggtcttccaagctctgccgcagcgcgtgcgcgatctcctgctgtgttagcccgctctcgttgtccgcaattttgaaaatattcatattacaccccgctgtatgcgctgaaaccgccatcgatgggcagcacgacgccggtaacaaaggaggcagccttgtcgtccagcaggaacaatactgccccaatcagctcctccggccggccaaatctccccataggggtagccgctaatatcttgccggtacgaggcgtcggggagccgtcttcattccacagcagtgtcttgttctgctgcgtagacaaaaagcccggtgcgatggcattgacgcggattccctgcttaacaaagtgaactgccagccactgtgtaaggttggatacggcggccttggcaccggaataggcagggatctttgttagcggcgtatatgcgttcatagacgagatactcaatatgctgcaccctccacggcccagcatatcctgtgcgaacacctgcgtgggaatcaaggtgcctgagaaattcagctgcagcacgctctctatatcctccggccgcaaatcgaaaaagctgcgtaccggcgcatctaagtcgcctgcctcgtaatactcatgctccgtggtggcctgcggcttgtttcctcctgctccgttgatcagcaggtcgcactgcccaagctgttccagtacccggcgatggcagtcctccaccgaatcacggtcgcacacatcacagacataggcgcgggccgtaccgcccaccgcggtgatctcatctgctacccgttgcaccttctccgccgtgcggcccagcaacgcgacccgggcgccagcctctgccagtgccttggccataaccgagcacaggacacctccggcaccggtaatgaccgcaacccttccgtcaaaagaatgctccatgtgttacctccattaagcgttataggtgcccgcggccgtgctgccgccatgaccggtccagttagtgtgaaacacctgatccgccgatgcatccaagcgccggtaagtatgtgcgccgaaatagtccctttgcgcctgcagcaagttggcaggcaggcaacgcgtcgtatatccatcgaaataactgagcgcggcagacatcgcaggcgccggtacaccgcagctcgctgcagcggaaacaaccgtgcgccacgcaggaagcagctccttgatggttttttcaaaatagggatccaaaagcagattagatagcgccggattttcaatataagcgtccttgatcttccccaaaaaagcactgcgaataatgcatccgccccgccacatcagcgcaatgcctccatagttcagattccaaccgtatgcaccggcagccgcccgcatcaacgtatagccttgtgcataggatatgatcttggacgcatacagcgcctgatgtatattctcaacaaacaattctttgtctccggtaaatggggggataatgcgatcaaagacggcggcagctgttacacgttcgtccttcatagcggataagcagcgggaaaacaccgcttcgctaatcagtgtcagcggaacaccctcgtccagcgcagctgtggctgtccatttgccagtccccttctgtccggcggtatccaaaatgtgctccaccagcgggcttccatctacatccttgtaggccaggatatcgcgggtgatttcaataagatagctatccagctctgtatcgttccacgcggcaaaggcttggtgcatttcgccatcggacatccgcaagtaatcccgcatcaactgatatgcttcacagatcagctgcatatcgccgtattcaatgccgttatgaaccatttttacaaaatgtccggcgccattttcgccgacccactcgcagcagggggagccgtcctccaccttggcgcagatggcctgaaaaataggcttgacataaggccatgccactgggctgccgccgggcatcatgctggggcccttcagcgcaccctcctctccgccagaaacaccggtaccaatgtatagctttcccttactctccacataggccgtgcggcggatcgtgtcggggaaatggctgtttccgccgtcgatgaggatatcataatcatccagcaggggcaacagctgttcgatcatgtcgtctacggcctgtcctgcctttaccatcataaacaccttacgagggcgctccagctggctgacaaactcctccagcgtatggcagccgatgatgttctttccggcagcacgaccggcaataaaccgatcggttttctccgttgtacggttatatacagccacagtgaatcccttggattccatgttcatcacaaggttctcgcccatgacggccaagccgatcaatccgatatctgctttcttcattacttctcctcctatcgctgtacacgggcattacccgcgtatacgtcccatacctgcttttcatcggcaggctctgcataatcgttgagactggaggccgccaatacgccggatgcccagccaaattgcaaacatttttcgccgttccatccattcagtacgccgtacaatacaccgccggtaaagccgtcgccaccaccgatgcgatccatcacctggatggggcggggctcctccacataccatgtatctccatccaacagaattgcaccccagagatgctcgttggcggagatcacctgccgcagtgtggtagcaaacatacgggcattgggataccgctccttgacctgcgtgatcatcgccttaaagctgtcgatcttccccttcagttcttttccccccgcttcagggcccttgaagcccaggcacagctggaagtcctcttcattgcccaccagaatgtcggcgcaggaggcaagcgcgtggaacgcggcagataactccgcctcgcggccctcccagaaggtggcccggtagttcaaatcgaaggaaacaagcgtgccatatcgcttggccgcctcggccaatgcaaggcaacactgtgttgtctccgggctcatggccgcgatcagaccagagatgtgcagaattcccacgccctcgtgaccaaagatgcgttccacatcgaaatcgtctatacagagtgtgcgacccacttcgccggctcggtcattccaaacacgtggtgcccgcagcccaaagccggaatcggcaatattgaactgatgacgaaatccccacggaccgccctgctctacctcgacgccctcgaatcgaatatttcgggcgcgaagctgctgtttgataaattcagctacgggactgcccttgacaaacttcgtcatagccaggcagcccataccaagactggacgcaacgttcaatacgtttgtttcggcactggtagcctgcaaacgaaacaagtcgctattgtgtacagccatcctgtcaggcggcgtaatgcgcacaccaatagaagttacgcaggcgatggcatgcaaaggcagcacagcgcggtcaaactgcttcataaagggttcctccttgttatttgtgatcgtatagccattgtagtttgagcacaaaagcaagtccattgacataatgcgcatatcatattgcaaaaaagcgcattgctgtgctatacttgtaaaaaggaggatgcgccatggaatcacatttctattatcgggacgaagatctgttcgtccaccacacattggacaagcatccgacgccggatagctttcccatgcacgcccatgagcgtatggaaatattctactttctctctggctgcggcgcttatctgatcgaaggtacgcagtacgacctgtgtgcaggcgacgtattgatcatgcgccacgcagaggcgcacaagctgctgatccgcccagacgagccgtatgaccgcattgccattcacttttctcccagactgctgtcctcactggatccggagggtgcgctgctccgtccatttctgaaccgtccattgggacggatgaaccgtgcggcgccaacagttggaaagcatgcctcgcagttgctgcaattagagtctctgcgagagtcgccttaccagacgagactgcggatcatcagctgcctcctgcctctgctgtgtgagctgagcgactcctttcaggccaatgcgtcagatgcagcggacagcggcacgcaatcactggctgcacgattgaccgcctacataaacgatcatttgtatgaggacatctctctggaagccttgtgtcaagttttctttctcagccgctcgcagatcaatcggatcttcaccggcgccaccggaacgtctatttggcggtatgtgaccatcaaacggctgctggcggctcgagcgatgatccgcgaccatgaacctgccggtgatgtctgcacccgctgcggattcaacgactattcggcattttaccgggcctataaggcgcgcttcggctgctcccctacggaagatatctgaattatatgcaatacatacaaatagagcagtaccgcatctcaaatgagatgcggtactgctttgcagcctgtatggtcatcatatacgcccattccctctgcgttatttttctacagaaaaatatgttgaggtgtggtccttatttatgagatcagggcggaaggaatctcgcagcaccaattcggttgagatcaccacgcgggaagccggacgctcgccccgaagcacacggagcaggatctgtgtggctgtggcgcatactgtctcaacattggtatccatgctggttaattccggcgtagtacactgggaaaaccgggagttattcagtcctacgatgggaatgttgatttctctggcttgcagtgctttttgtgcgcctactgccaaaatatcatcagccgcaatcagcgcatcgaacgcaataccgtcatccagcattttttggatcatttcgcgagagggctgcaattcgtcctctgtctccgggatctgcaggatcagctccccatcatccggcaatccgcattgcgccaagccctcccggtatccctgaattttttgaaagccactgaatgaacaggtatcattcaaatacaaaatacggcggcatccatagtcaaagagcgttttgaccagattttttacaccctcccgctcatcactgagtacacaatagacgttgtccagctccaccaaaccgttgataatcagaatgggtatctctgctgcgatgggtacaaaatgctcatattgggtcagttcctccatcgtagagccaattagaataatagcatccacgcgacggttgtggagcaaattcagggattttgccttgttttcactgacgctgtcggtacagctcagaagaatatcgtacccggcatcccgcagcagatgctccaatatcgaaaccggtttcacatggtttatatcagagatgatcgggcaaaggatccctatcgtttttgaggcggtcgaattaaggtttctggcaaagatgtttggcacataccgctcctggtcaatgatctccatgaccttgctgcggtttttttcgctgacattagcgctgttattgataacgcgtgatactgttgccacggaaacgccggctttctctgcaatatcatagatattcatgcgtacaacccctgagaataaaatttatcactgatttataacagtttaccatacagataccgccttgtcattgtacaaaaaagagaaaaataatcgtgtcaaatgttgaaaagtgaactattgaaatcggttacagcgcatgatgcaagcatttttcaataaattgcaatgttatttcgtagaagcaagaaatacaaagcaactattttgccgcaattgcggttaaaaccattattgacaatcgcatttttgcaatatatactcctgtgtaacgggttacaaattgcaattcaagcacacagcggcagaaataggagggcgcacatgctgatagaagtaaaaaatctgcacaagtcctttggagagaatcaggtgcttcgcggcatcgacgtttccatccagaaaggcgaagtcgtcgtggttatcggaccttccggttcgggaaagagcaccttcctgcgctgcctgaacctgttggaacagcctaccgacggacaggttatctttgacggcgttgatctgacggatggccatgtaaatacgttagaaacatgccgccgcatgggtatggtgttccagcggttcaatctgttctccaatctgacgattttggacaatgtaacactggcgcctatgttggtaaaaaagcagtcacgcgcagaggcagaaaagcgggcgctggccctgctggaaaccgttggattgtccgagaagcgcgacgcctaccccgagcagctttccggcggacaacagcagcgcgtagccattgcccgcgcactggcaatggagccggaggtcatgttgtttgacgaagccaccagcgctcttgacccggagatggtgggtgatgtattaagcatcatgcgcgacatggcgcgtcaaggcatgaccatggtggtcgtcactcacgaaatgggcttcgcccgcgaagtgggagaccgcgtgttgttcatagacggcggcgtgatcgtagaagaaaacacgcccgatgagttattcagcaacccccagaacaagcgcacgcaagacttcctgagcaaggtactttgatcaggacgaaataatgaaaggatgaaaaacaaatgtctgccatcaagtttcacaaagcaagcgaatacaagaaggtattcaacgaaaacggtctggctcgtcagagcgttttgaccggcgagtacaaggatgtcgccatctataagtgtacgctggctgccggtgcaaaatgggagccggagctgtatccccagcaggagaaggtgcagatcctgcttttcaccgagggtaccggctatgtagccaccccccacaaggcatttcagatcgaagaggtctccgtgtttgtcccccgcttcgaccaggagagcttctttattcaggccgatagcgagctgagcttcctgcagatcgtcgccaacctttccgactatgaccgcgaaaacatggccgactcccacatcgccctgccccgcttccgccccgtgtctcagggctggcagtacgaggagaacttcaagacccgcgacatcgaatcctacaccctgatcgagcaccgctatttcggtcgtttgtccatgggcgccgtatacggcaaaggccccaacgaggtcggccagcacatccacaacgagctggagcagtggtactacgccctgcccggtgcaaagttcacttaccatgtaaacgacgaggagatccccttcaacgagggcgacctgtcctatactccccacggcaactaccacggcaccagcgccgaggacggccagcgcttcgactatatctggttcgagctgtgcgagaacggctatcccggccagctgaagtaagcgccatgctgtcgccagacacgatcttaggcagcaacggattttacagtcattggacgctccctgcgtttctgacggcgcagcaggagatgggtgtgcgccgcatcgcttttcaccacgtccccgcgcacctgtggctggatcactatcgctgcgtgggcgcagagacgctgaaacagcacttggcagaggccggtatcgcagtggatgtctttcaccccggccggtatcattacagccttttcgcctcagccggaacccggcaggatctatgcacccgcgagtacctgcgccgctgtatggacgtcgccagctcgctgggctgcaccacagtttgcctgcagcccgatggcgctctgatagacgaccagaacagcttgtcgtcgttgtgccgccaattatccgcgctgtgcggcgacgccgtccagtatggcgtgaccctctgtttacaaaccgttaccccggaagacagcgccatcctgcatacgctgccccagcttctcacggtgttggacgccgttccagagctggcagccgcgctggacactgtacccgtcagcctggcaggcgagagcatcccccagtggtttgacaagctgggtcagcgtatccgcttcgtaagatttcaggacggccgcggctgttacggccgtatttggggacaaggcgtgttccccagtcaggactacgcgcaccagctccttcacagcgggtatagcggtcttgtcagcatcaacggtctttcgacacgttatcaagaggatccagccgccgcagaccgacgcaaccgtgccgcagttctggccatgctgtccggcaaggaggaaagcagcctatggatttgatacaacgccgtcaggcagccgtcatgaaccagcattatcaacggtactcgctggactattttctggatgcacagcagcgtatcggctttaccagcatcgagctttggtgcggtgcccagcatttttggctggacgaccagcactatgatgatgtacaatcgctcttgcgcaaagtgcagcgccgtgggctggaggtggtctccctcacatgccccagcttttgcttccagtatcagtatgcgccattttccccagaggtagcagactactgcctgtcctatttcaaaaaagggctagctgtggcagaggatttaggctgcaccgttatgacggtcaactccggctggggctgcatggaccggccccgccaggaatcctggaacgcctcatgcgagctactgcggcagctggccgaggaggcggagcagcggcatataacgctggcgctggagtccctgcgtcaggacgagacagatcttgcctatgatctgcctaccacgcggcagctcatcgagcaggtgggacaccccagcttaaaggtcatggcggacaccatcgccaccggtgcctgcggtgaaacgttggaggattggtttgccgcattcggctctgatctggtgcatatgcactttcttgacggcgaccccttcgtacacaatatatggggcgacggcaactatccgctggagcagatgctgcgttgcctgcaagccaacgcatacaccggctatttggtgcaggaggtagcggacgagcgctactttgccgaccctgtcgccgccgacctgcaaaactaccgtgtgctgagccgtttcttctctgattgaggcggcttgcaaaaaaagagaacaaacttaagaaaggtaaggaaagcaaaatgaaaacgatgaaacgcgcattgaccctgattatggcggtcatgatggtcgccgcgatggccgcctgcggcaataagcccgcagcgagcaacggtgacgaaaccaccgacgacggatccctcaaacgcgtgcaggatgccggcaagctgatcgtggcctgcgagacatcatggccccccttcgcctacattgatgacaagcagcagctggtgggctacgacgtggaagtcgctgccgagattgccaagcgtctgggcgtagagatcgagtactccagctccaacagctgggacggcatcgtggccagccttgactccggccgcgtggacgccatcttcaacggtgtgaacatcgccggccgcgtggacaagtacggcatgaccatcccctatatgcagaatcagctggtgctgaccgttgccgccgacaacgaggacatcaagagcttcgaagacttggacggcaaactggtagccaacgcactggaaggctccaacggtaagctggcaaagtcctatggcgccgagctgacccccgccggtctggcagaggccatgaccctgctaaaggatcaccgcgctgacgcacagatcgaggatcagatcgttatggccctgtatctggagggcaagcccgacatgaagcagtacgtcaagcaggtagccttctatgagcccgcagatatcaccgagatgcaggtggccggctgcttccgcatcgccgacaaggagctggtagaagcctgcaaccaggctctgactgacatgaaggccgacggcaccctgtatgatctggctgtaaagtatctcagccaggacgtggccgacagtctggatgtgttcactaaataaataaacaccgagccggtggagacgctcgtttccaacgggcgtcccaccggctattacctttcagaaagcgagtgtgcgtatgagcgatcaatttatgaggatcgtggagattctcctcaactctttctggcctctgtgcaaggcagcactgaaatatacgatacccttgaccattgtttctttcggctgcggcacagtactggcttttatcaccgcgatcttccgcttgtcgggcgttcgcattttgcaaggcattgcaaagttttatatctggatcatccgcggcacgccccttctggtgcagttgttcgtgatcttctacggcctgcccagtctgggaatcgtgctcagtccctttgtttccggcgtactgggcctgtccctgtgtcagggcgcctataactcggagatcgtccgcgccgcgatcctttctgtccccagcggacaatgggaggcagccaaggcgctgggcatgactcgggcgcagacctatatgcgcatcgtcattccgcaggcggcgcgcacagccgtcccctctctgggcaatcagttcatcgggctgaccaaggacacctctctggccggtatgctgaccatccccgagctgctgcagaccggccagcagatcaccgcagttgtctacgaaccgctggcgctgtatctggaggtggcgtttgtttatctgctgatgaactccgctctaaccgtgctgcagagcaagctggaaaagcggctgagcaaacacgtacagcagagaaccaactgagagggaggcagcagcaatgagtgcaatcagcgacattttgaaagacattcgtctgccgcgcatggtacgagtccaccagcaatttgactctcaggtggtggaggacatccccggagagatcacgcgacagctgtccggtgattttcctcacggaatcaaagccggtatgtctgtggcgatcacctgcggaagccgcggtatcgccaatctcagcaccattatgcgcacagttgtggatttctgcatccgccaaggcgcacaccccttcatcatacccgccatgggcagtcacgcaggcgcgacagccgaagggcagcagggtatgctggccgcgttaggtgtgaccgaggagagctgcggctgtccgatcatcagttctatggaaacaaaggtcattggccagacagcagagggccacgtggtacagatcgaccggcacgcagccgaggcagacggcattatcgtcatcaaccgtatcaagccccaccccgtctttgtcgcgccctatgaaagcggcctgatgaagatgatgaccatcggcttaggcaagcagaagcaagccgaggtcgtgcatcagatgggctttgagaatttccatcacctcatccccttgttcggcaatgccgtgctggatcacgccaatattctctttggcctggccatcattgagaatgcctatgaccagaccaaccgcctggtagctctgacaccggagtgtatccggcaggaggagcccagcttgctgctggacgcaaaagccaagatgcccaggctgctttccggctacgcggacattctggtcgtagataagatgggtaaggatatcagcggtgatggtatggaccccaacatcaccggccgcttctgccagtactacaccggcaagccgaacttcacagccaagcgcgtggcggtgctcgacctcaccgaggccacccacggcaacttcatcggtattgaagcagcagacgtgaccactcgtcgagtaatcgacaaggccgatccagagcagacataccccaactctctgacatcctgcggcaaccagcacatgcccatgtacatgaaaaatgaccgtgaggctattcagtgcgccattaagatcagcaccggcatcgacctgaatgatgcccgcatcatccgcatcccggatacgctgcacgtgacagatatcatggtcagcgagaatatgctgccggagattctgcagcgcaatgatatgcaggtgttgggcgagcccgaggagtggccttttgatgaaaatggaaacctctggtgagtttcagactctacgcttcttgataggcaaaaaggatcaccgcccggtcgggcggtgatccttttttgatacacgcttgacgcaagagctcagtccagcagtacatcgatgccggagttacgcatttctccgcaatgacctttgtggatgacgaccttacccagaccaaggagagtatgcagctctttgcggaagaagtccttccggcatttcgttgagaagggtcggtgaaacgggtatggagttgaaagcatttcgccgccgccgcgtgcaggaggcgatgaaggattccaatgtgcagatcctgatcgcatcccttccgcagaacatcgcctatctgaccggaggatatgtgagcgtaggtcaaaatgtgctgtgttcatcacaggcctatgtcgcctatctgcttccggagggtaagctatactgcatcgtcggtcacgccgagatcccctccgtgttggagtttgagggcggcaacgcagagatcgtgccttttggagccttccgctttgcatacgccgatgctcttccgaagccgccagatattccgagtattagcagaaaacaaagagctccgcactacaggcgcttctcgatacgcttcgcgagctggtcaagaccgacgatatgcaaatcgctctggataccagccgtatgccatacgaaactaccgccggcatacttgcagcattccccacggcatctgtttccggcgcagcagtattctataaggctcgcatgattaaagctaaggaagagatagcgggcatcgcacgttcggcgcagatcgctgagcaagcactgctcgccggcctgaaggatttccgtcccggcgacacagagcaggacctggggaacagcttccgccgccatgcggcacagcacggcgcgaaggatatcttctgcgtggcgactgccaacaaacgtgcggcattttgtgataccgtcaaccagcctgttcctatcgaacgtggaagtttgattcgttttgattacgggtgcgactatcagggttatacatcggatctgtccagaacggtatgcgttgggacgccggatgaaaaaaccgttcgtctgtatgatgcgattcgtgccggcacagaggcggctatcgccgcagcccgtcccggcgtccgagcctgtgagctgtttcagatcgcagtagagacgactcgcagcaatggtatccctcattacaggcggcaccatgtgggtcactgtttgggtcttgaggtctatgatgacccgtctatcacacctgataatcagactgtgctgcaggcagatatggctttgaacatcgaaacaccgtattacgagcttggctggggcggcgttcaggtagaagacaccgttgccattaccgagaacggcgctgtgcgtctggatgtgagcgataatcatctgattgttttggatatctgaaggctctgccacgattcggaaagatgcagcgccgctctgggtgttactggttagtctctccgccttaaacatccggcagcgtgcatcttttgggataggctatgatggcacgatcccctcggcagtctaagagcgcgcttccctttcacacagggaagcgcgctctttcttcatttatttgatgcagcgggaaggagtttgtcacctttgcagcaccgtcaattctgtcggatgcagcagcaatactttcttccaagagtatggttggtttttttcggacttctaaatattactctgtcctgcaagtacacctgcgccgcatactttccattatcacgtcagtcatccaaccccgtttcatgcttgaggatcgcgccggtggcggcgttgatctcgtagctgtacgccatgccgccggacttgaactcgacctcgtagcacgggaagggagcttttgcataagcaaaagctcccttcttttatgtggtttcaccaagcgcaggttatgttataggcttccatctcctgtcatccgtgtaatgcgcggaaagggcgttttattgcatttggacttaaaaacttttttgatcaagctccgctgagcacctcgtaaacgcgggccaacgctgctgtctcatagataaagcgagctgtcagctcccgttccccccccaccacgtcctctgcggcgttgtgtaatgccccgtctcctgctccgcctccgccttggcggcgcggatggctttctgagcggagagccaccggccgtaggccccgccatacaagtcctttttcagtttccgcagtgcggccttgtacgccttctccgctccgctggggccgttgtagttaagatagatcgccagctcctgaaaggtcatgccaacctcgtccggctgaccgatgccaaggtagcttcgcaccagattcagctctctgggcgtcaatacttgctccatccgttgcatcagcagcgtccggcgcatcaggcggtcataggccacggcagggtcgccgccgcagctgacggagaacacatcgtcccctaactgctggacgcaaaacagcgtccggtattcttttatcaatgccccagctaccttgacagatacattcagttctccgcacaccaccttgaccaactcagcatcagatgagtcccatccctcggcacagaggtatgccaccctgcgcagttgattgtaccggctggttgggacggacagaggaaaggcgtaccgcgcggcgtagtcgggcagcgccgcttctatcgcgggcgtcgcataggtcagcagttttgttccgtaggcgggatcaaagcgccctgccgcgtccagcagtgccagcgccgcctcctgcttcaaatcctccatctcacaccacggcgtgtacgcccgcaccgggtcggtgaggtaaccctcgttctgtgcgacgagctgctccgcggcgtttttgtctccggcttgtattcgcaaagccagctcttcattgcaggggccgcccccggcaacggtgtacatatttttcgtcacaggaatgcccccccttcctcatttcagccgcttctctgcctccgcgtaaatgtgttccaattccatgtcccgcgcatatccgtcagcggcatagtcgttgtccatcagtgccttgtcccggtagctccccgccagatacagtgcctcccgccgcaggtcatcggagatcttccctctctggtgatgcttgcggatggtgtcggtgcgggtattgaacaggcggtagaccgggtgctgtttgttctgctccttctggtgcatcatcgcgccgtactgccggcaggtatagcgattgtcctgcggggcgacgccgtcgcagtatttagggatgtggccgttggtggtcagaaagtatcttccgcagccttggcactggctgggcgcgtggccgtggtgcaatccgttcatcaggtcgaacacataaaagtcaatggcacgcttgcaaatcacacgctgcgcggttttccatttttcctcattgttctcatcctgaaaatatttgaatcctgtgataactcttggataggagaaaaactcctctaccccgccaaacggcatctgctccaacaggatcagaaagctgtcatcctcatcaaagcactcatgcgccgcctttgcgaaggcgtctgcattacgctgcttcgatccgcgcagatatttcctttcaaatgcgcggatgagcaggcaaaaattatagattgccaccaagcttctcaggatcggctcacaaaaggaaagcgccaagtacggaagatgcgcctcctcttcctcgtagtcccgatcgagccgctcctcactcaaagcatgttcaagattctcatacgcgcgttgctcttcgcaatagcaaaacggaggacaagtatacaaccatgaaactgtgttacgcagcagcggtttcagttgtgacgcaatatcatggcgcttgctcttttcggctgtgctcaaatcgtccacgagcgccgtcagcacagcgatacgctccagaagaggatcgtggatcgcaccggcaaagttcaagatctccgccgcaaaatgtcccgctggaaattcctttccctcgtagtacacacggtcattccagcagtccattgtcatggtgtcaaatgtgttatactgatccgttccgatcttcaaaagcccgcctcctgtcccatatccgttttacagctgtcctgcgatattctcattctatcaaaaaatacagaataatcaagtgaaagggttagagcctcgactgcagcgaggtctctgcccttatccttttatccggaggttttttatgtctcaaatcaaacgactgcaaaccattgacgcggacacgctgcaaagcaccgcttatgagccggtctccttcgtggtcgacgatctgctgccccagggactgcacctactggcaggcgcgccgaagatcggcaaatcgtggctggcactgtggctgtgtctctgcgccgcgcagggcaagccgctctggaccttcgccacgcgcccatgcgaggtgctgtacctctgtctggaggacagcttccagcgtatccaaagccgcctctttgatctcacggaggacgcgccgcccacgctgcacttcgctgtcatgtcccagcagctccacaacgggctggtggaacagatcgagcaattcctgaaagagcatccgcagaccaggctcatcgtcatcgacacgctccagcgtatccgcaccgtgggcaatgacgcaaacccgtatgccagcgactatcgggacatcggcgttctgaaagcgctggcggacaaacaccgcatcgccattctgctggtgcatcacctgcggaagatgaatgacgatgatcccatgaacatgatctccggcaccaccggactcagcggtgccaccgacagcaacttcgtcctccgcaagagcaagcgcagagaaaacaccaccacgctctactgcaccgggcgggacatcccctaccgggaactggcattggagttcgatggcgaggatcatgtctggaagctgctgtcggatgactgcgaacagacggagcagcccagtgagagaattctttttcttctctctgaactgctgcgccagcagccggagatcagcgcccctgccaaggtgctgctggaaaagatcgaccctgtcggtacggagggactgacccccaacagcttttcccaccgaatccgcaaaagcgttgacgctctaaggcgaaacggtattacggtgtccttccgcaagagcaacggcgaccggctgatctgcctgaaaagggccgatggggtcgatgatctcactaccgaaaacatcgtcaccatcgaccctgagaacccgccgtgtttcggcgtgtgagccgctgtgtgcgcggttcggggctggggtggtggtgtacacgccgagagctgtttaccgcacacggcgcgggacgcgggaatcgtcgcccactcaggtggcggcgacggccagcatcgcatttgtctggtctgcggcgaagccgctgccctgccaaatgcactgggcggggcgtggccccacaccccattttcgggcagaagcccacacccacttaaagacccccagatctccgaggggacgagagaaatcatttcagaaaggtcattgattatgaaaaaagatatcaaattcagtacgcgcatggcgtccgctgaccgcgagaagatcaaagcgctggcggcgaaggctcatatgtccatgagcgaatacgtcactgcctgctgcctcggcaagcggatcattgtcatcgacgagcagaaagagctgctccgccagctcaagggcattggcagcaacatcaaccgcctcaccgtccttgccaacatgggcaaggtgcaggtcatcggtctcgacaaggccgcgcaggaactgtccgaggtcagcgccgctctgcggtcagtcttggaaggtcggtgagccgtatggccatcgtacattttgtgaactacaagcggggcacgcagtcccgcgccgccatgcgcggcgtgatgctctacgtcatgcaggagaggaaaaccgcatgggaggatgggccgctcatcagcggcatcaactgccagccccaaagcgtctacgacgatttcctgaacacgaagctgctctaccacaaggacggcggcgtgctgttctaccacatggtgcagagctttccgaagggcgcggcggtcgatccccggcaggcccacgaagccgcgcggcggctggcggaatacttcgccggctgcgaggtgttggtctgcacccacgtagaccgggagcacatccactcccactgcgtcatcaactccgttaactttgagaccggcaaaaagctgcacatggcaaaggaacagatccaggagctgatgcggcgcaacgatgcgatctgtctggaaatgggcctgccggtctttgagccgaccacgcagcaggcccgcggcatgggcggcgcggagtatcatacagcgctgaaaggccaaagctggaagctgcggctcatgaacgccatcgacgagtgcatgaaatatgccgccgacaaagatgcgtttatttctctgatggaatctgagggctatcaggtacgatgggaaagcggacgcaagtacatcacctacaccacgccggagggcatgaggtgccgggacagtaaattacacgaagaaaagtattgcaaggaggtcatggagcatgaattcagagtacgagcggagattatccacggacgagctgaaggcccgcaaccgcgccgatgcggagaagccgaaaaatctgctgagcagcgcaccgccgagtacaccgacacagccgatgcaccccatcgtgatccaatgtccgctgccgcaggctatgagcaagctgacacagcaggcggatggaataaactgggagctggaggaaattcggaatatgctgccggagttgaaaacgcacaccgacctgtccggggtgcagaggtcgctcacggagatgcagaaatcgctgacggagatgaacgaactgctggaacgggttgggaacctgagcgagaaatattcctccgagtggatcgactggctcccgaacttcagcctgctggtggccctcaagtggatcatgctgatgctgatccttggcacagcggcactggcgggttggtatggcgcggcggcgatccgcggcctgttcctctgatgcctgccgtggccggactggctgtcgcggggacattgatggacgaggatgaggacgccgaggaaaagcggcggcgcatggaagcgaagatcgccgccgaaaacctcggtgctgtgatcggcttcgccgcaggcgcagctctggcaatgaaaggaaaattggatgaacaggctgcgcaagaagaacagaaaaagcaacagcagcagaccatgggaggattgtaagaatggcaagcatcaagcaattggatgagcgacggtataagatcaccgtcagcaacggctaccgacccaacggcaaaaaaatcagcaaggcgaagaccatccaagtcccgcccggtgtccccaagcgcggcatcgggcagtatgtcgcccacgctgccgaagagctggagcgcagcttcaagactggctacgccgaggacggcgagatgacctttgaggaattcgcctcccgctggctgaagcggcagacgaaatatgcccccagcaccatcgctgcataccgccggatgctggaggtggtgtatcccatgatcggcggcatccgcctcaataagctccgaccgatggcactggaaaatatgctctccgagctgcgcaagcgcaagcaccacggaaagcgcatcaacgaatccaccgcgcagcgatacctctctgtggtctccgccgtactcagcgacgccaagcgcaatgagatcatcgagaagaatcccgcgcggatgttagacctccccacaccgcagcgcacggtgcagcgtatccccacgcgaagcgaggtggaaaagctgctggacgcgctggcaaaggagccgcggaactaccgcctgttctatctgctctccatgtacaccggctgccgccggggcgagctgtgcgctctgcaatggtcggacttcaccgccacgcaaaatggtctcctgctcaccgtcagccgctcccgcagcagcgttcccggcaagggcatcgtggaaggcagcaccaaaaacggcaagagacgtgaagtctatctctcctccgatctgcgcggcatcctcctcgcctacaagcgccgcaagcagatggaggcggacaagcagcgccgcaggctcagcccccacctcttcaccgacgagcaggggcagctcatccacccggacaccttcaccaagcggctgcggaagatttatgaatccatcggctttccgcgggagtaccatctccacaccctgcgccattacttcgtgacatcactgctgcactgcggcgtggacaagcaaacggtggcagatattgtcggccacgctgatacaggattcttagagcgcacctactgccatccacagcagaaacagaaagaacaggcggcagcctccatgcgcaccatgctccggtcggacggcagtccgatttttaatctggctgctggttgttcccaaagacggcacagcgcctgattgtcgctttcgtagaaattcggttttcggataaattacagtagctttgcctatgcgcttgcagtatgttgtgcttgcaaaatccacctcaactgtattgaggtcaaatgaaagcgaggtcattttatggcaagcatccgcaagcgcggcagcagctatctcatcgtagtctccatgggctacgactacaacggaaaccgcatcaagccccagcagaaaaccgtacacccgccggaggaactgacgcccaagcaggtggaaaagtggctcaacgaacaggccgtcctctttgagcgggaatgccgccacacgccgcagcccgtccagcagctcacgctggcaaaatacatcgacctgtggctggagacggttgcacccagcaagctggcaaagtccaccatccgccgcgaccggcaggacatcgagcgcatcctcccggcgctgggccactacaagctcaccgagctgcggccggagcacttccggaatttctacgccgaactgcgaaaagctatccgtcccgacacaaaaaagccactctccgagtacaccattgagggcgtgcacgctacgctgtgcagcatcctctctgatgccgtggagagtggctttctttcgcataatccggcgtggcgcacctaccgctacgccgggcgcaagtgcgaaaagaagatcgcggacgaggaaacggcgcagaagatcatcgccgcgctggagggcgagagcatcaagtatgagacctacttcaagctcatcatcgccacaggaatgcggcggggtgagtgctgcggtctgaagtggtgcgacattggttgggagcagcggtccatccacatctgccgcaacgcggtcaaggtgacggacgaggagatcttcgtcaaggaacccaagacctgcgcgggcaaccgctatgtgtacttctcatccgaaatggaaagtctcctgcgggagtaccggcaggaatgcgcatacatcaccgagacctacgatcagcgggagctgaccgccgatgacttcctgttccgccgtcagggagcgcggcttcccatgacgcccactaccttcacctaccgcttcaagctgatcctcaagaaaaacggcttgccgcaggaactgaacgtccactccctccggcacaccgccgccagcctgatgattgcaggcggcacggatgtggcaacggtggcgggcattctcggccacagccagccctccaccacgctggacatctacacccacgccttcgacaagaacaaaaaggccgccagcgcggaactgcaagggatgctggagatatgacatagcgtaatagcttagttggatcgcaaaatgtgcagtagtggtcaaatcgggtttcaattctcctaactttccgcatataaaaaccgtctcaagcgatatgtttgagacggtttttggtacgcccgactggattcgaaccagcggcctttagagtcggagtctaacgctctatccaactgagctacgggcgcatattctgttttatcagcttacagccccattactataccaccttcccggcacaaagtaaagaaaattttttcttccgactttgttaaaaaagttgacaacttgacagacttgttgtagaataaccacaatacatcgagcgctgtgcgccgcattccacacaaaagaaggtttttctatgaagaagcaaaaaatctccgatgctgtcattcatcgtcttccccggtactatcggtatctggacgatctgtacaacaaaggcgtggtgcgtatcagctccaactctctgggcgccaagatggacatcaccgcctcccagatccggcaggacctgagctgctttggtgagttcggccagcagggctacggctacaatgtggccgagctgcgtgcggagatcggccacatcctgggtatagacagcggccaccgcatcattgtgatcggtgtgggccatctgggtcacgccctgctgcagaattttgattttgataaggtcggtttccggatcgactccgcctttgatgtctcccccgcgctgatcggcacggagatccgcggcgtctcggtccactcgatggatgagctggaggaatatgtcgccaactatcaccccaacgtggcggtcctgaccgtcccgcagaatgtagcccagccgctggcggaccgtctgatcggtctgggtgtgcgcggcttctggaattttaccaatgtggagctctccaccaaggaggacggcgttttcttcgaggacatccactttgtggacaccctgctgacgctcagctatcgcatctcgcagctctgaggcgcacactttaccgcagccggcatactatgagaatgagaccgatgtggcggtcaaattttcataggaggttacggtatgtgtaatcagaattcctgctttggcggcagcagctgctgctggatcatcatcgccatcatcctgctgttcctgttctgcggcaacggctgcggcaatggctgcggctgcggcggcaataacggcggctgcgggtgcagctgctgaggatctaccgcgcattacgcgtccccgccgcaaggcggggacgtcttttttcgcaggccgctctgcgatacaaccaaacatcgataaaaacaatgcggacaagctccgcttttgaccgagaggaggcccgatcatggatatttcccccctgcgcggctactacgcggcgcatacgcccacgctgatgggtgagagaggcggctccgccgtgctggtccccctggtccgtcaggacggcgaatactgcctgctgtacgagatacgctccgccagcgtccggcagccgggcgaggtgtgcttccccggcggcaagcgcgaggcgggggaaacggccatccagtgcgccctgcgggagacctgggaggagcttggcatcccggaaagcgccgtgaccgttatcggcgaaatggacttcatccacatccgtgcgggcagcctgctccggcccgtgctgggtgaggtggaccctgcggcactggcagccatgcgccccgcgccggaggaggtagccggcaccttcctgctgccccttcgggagttgaaggcgcatccgccggaggtctacctgtaccggcagccagtggaggccccggatttcccctatgcggacgccggcgtccctgcggactacccctggcgtccctggcggctggaggtcccggtgtatcacggcctgccttaccacctgtggggcatcaccgcccgcattactatggatctgctcgcacatctgtaaaaagatcccccggcgatatacatcgccgggggatctttttacagcacgccaaaatgctccagaatgatcttcacacctatcagaatcaggatagtgcctcccacgaattcagccttattcttgtactttgcgccgaacacattgcccacatacacaccgcccagggagatcaggaacgtggtgcagccgataagacagacggccatccagatggacacagacagctccaccatggaaaacgtgacgcccacggccagggcgtcaatgctggtggccacggccagcaccagcagctccttgtgcttcacctgcccgtcggagggctgctcgtcctcctcttcctcagcgcggctctcgcgaatcatattcccgccgatccatgccagcagcacgaaggcgatccagggcgcgaaccgcgtcacataatgggcaaactgtgagcccagcagccagcccagcgcgggcatgaccgcctgaaatacgccgaaatacagggcgatgagaaacgcgctcctcttatgcaccttgtccggcatggccagtcccttgcatatcgccacggcaaaggcatccatactcaaaccgatgccgatcaggaatatctccagcaatgtcatacggacactctcctcacaaaaccaccggcacagggtgatcgatatacatggcgtccggcgcaacacggcagctgtaagcggcaatgctgacccccgcctcgcgcgcctgccgcagggccgcgccgaatgcgggatgtgtatcatcgttgggcgcaaaatcaacgacctccgccatctggatgacgaagaaggccgtagcccggcagccctgctccacagcgcgtatcaattcatgcacgtgcttcacgccccgctccgtaggcgcatccgggaagcgggcgtggccgccctgctccagcgtgacccccttgacctccaccaggtgcagcccgtcgggccgcgtcaagcagaaatcaagccgcgactcgccaaagcgaaactccggccggatgctctcggcctgcgggtcgaaggtccgtgcaaactccgcaaacgcccggttcggtgcctgggcgtccatattgatcagtctgccgcccttattcaccgcgacaagatcgtagggtgtcctacgccccggcgtgacacccggcaccagatacacctcagcccccggtaccagcagttcacgacagcgtccggtgttcttcacatggcagaccgtctcggcgccgtccagttccaccagcgcaatgaagcgattggggcgcgagagaaagcggccctgcaccacattttcgtaccgcatagccgcgcctcccctgctttcggaatagaaatacagtatagcacagacaatagcggatggaaagtattttcttccaaggaaaggtcgtttccctgtggtttgtgtattccgtcaatgaaccaaaaaattttttaggacttctcacaattttgcagttttagccgttttcggattgcattactaccaaatgtttggtacaatgtgggtaatctatattagtatgggaggagatccaaaccatgcctgaatattccaacctgttcgtcgtgctgatgggcctgggaacggtgtttgccgggctgctgtgcatcatactgctggtcacactgatgagctgggtatgcgcccgcacctccgcgcccaagaccgtgccccagatgccggcggctcccgccgccatgcccgcacccggcgccgtcacccccgcgatgatggccgccgtagccgctgccatcgccgaggacatggggaccgatgtctccgccatccgtatcgtatccatgaagaaagtgtaatgtgtgaggaggatttcaccatgaaaaagtacagagtcaatgtcaacggtaccgtgtatgaagtcgagctggaggagatcaccggcgcagctcccgctgtctccgtggccgcccctgcggctgctcccgcccccgccgcagcccctgccggcggcgaaaaggtctgcgctcccatgcccggcaacattctggcggtgaacgtgtccaacggcagcgccgtcaagaagggcgacgtgctgatgatcctggaggccatgaagatggagaacgagatcatggctccctgcgacggcaccgttacctccgtgtctgtgaccaagggcgccgccgtggagtccggcgcgatgctgtgcaccatcggctgacgccggaggactgcacatggaagctattgccaatttctttgtaagcaccggcttttaccagttcttccagggcgacaactggaagagtgccattatgctggtcattgccgttgtgctgctgtttctgggtatcgtcaagaagtttgagccgctgctgctggtacccatcgcattcggtatgctggtgacgaacctgcccggcgcggagatgttccacgagatcctgttcgccggcggacacgtccactgggacctgttcggcggcgagcccatcacggcacagttcctctcggaaatgctggcaaacggcgtatctgccgatatgctccagccttacgccgactccctgatgacggcggcgcagagtacgttcgaccccggtgtgctcgataacctgatggcacagcttgccgccagcggctccgaggccgtgggcacgctgtccaaccagctggacgccctggtaactgccgagcagtacctcgcctcctatggcatgaccctcagtaatgtcactgtcagcgtcggtctgatcgatgtgctgtacctgggtatcaagctgggcatctatccctgccttattttcatgggcgtgggcgccatgaccgactttggccccctgatcgccaaccccaagagcctgctgctgggcgctgccgcccagctgggcattttcctcacctacgttggctgccgcctgctgggcttcaccggcgccgaggcctcctccgtgggcatcatcggcggcgcggacggccccacggctatcttcgtcaccgccctgctggccccggccctgctgggccccatcgccgtgtcggcgtattcctacatggccctggtgcccgttatccagccgcccattatgaaggcgctgaccaccaaggaggagcgccagatcgtcatgaagcccctgcgtgaggtcagcaagaaggaaaagatcttcttccccatcgtggtcacggtgttcgtggccctgctggtcccctccgccgcaccgctgatcgcctgcctgatgctgggcaacctggccaaggagtgcggtgtgctggatcgcctcagcaagaccatgcagaacgagctgatgaacatcgtcaccatcttcctgggtatcagcgtaggcgccaccgctaccggcgctaccttcctcagccccaagactctggctatcatgggcatgggcgtggtggccttcggcttcggcaccgccggcggcgtcctgctggccaagttcatgaacctgttcctcaaggagaagatcaatcccctcatcggctctgccggtgtgtccgccgtacctatggccgcccgtgtcagccagaaggtcggccaggcggaaaaccccggcaacttcctgctgatgcacgccatgggccccaacgtggccggcgtcattggctcggccatcgccgcgggcgtgctgatctccctgttcggttaataggaggtaactatggaatttctgtctaataagcccctgctcatcaccgataccatcctccgcgacgcgcaccagtcccaggcggccacccgcatgaccatcgaggatatgctgcccgcactggagcagctggacaccatcggctactactctctggagtgctggggcggcgccaccttcgacgcctgtatgcgctttttgaacgaggatccgtgggagcgcctgcgtaccatccgcaagcatgtgaagaacacgaagctgcaaatgctcttccgtggccagaatatcttgggctacaagcactatgccgacgatgtggtggacgccttctgcgccaagtccatcgaaaacggcatcgacatcatccgtattttcgacgcgctgaacgacgtgcgcaatctggagcaggccatcaagtccaccaagaaatacggtggacaggtggaggccaccctcagctacaccatctcccccatccacagcgaggcctacttcgtcaagctggccaaggaactggaggacatgggcgctgacgccatctgcatcaaggacatggccaacctgctgctgcccatggaggcctattctctggtcaaggcactgaaggagacggtctccgtccccatccacctgcatacccacaacacctccggcaccggcgacatgacgctgctgatggcggcctacgccggcgtggacattgtggacaccgctctctcccccatggccaacggcaccagccagcccgccaccgaatctctggtggccacgctgcagggcaccgtccgtgacaccggcctgagcctggagaagatgtcccccgtagccgcccacttccgcaaggtggcccagcgcctgcaggatgccggtatcctggaccccaaggtcctccgcgtggacaccaacaccctgctgtatcaggtgcccggcggcatgctctccaacctgatctcccagctgaagcaggctggcaaagaggataaatactatgacgtactagcagagatcccccgcgtccgcaaggacttcggctatcccccgctggtaacgccctcctcccagatcgtgggcacccaggccgtgatgaacgtcatcatgggcgagcgctacaagacgttccccaaggagtcccgcgccatgctcaagggtgaatacggcaagctgcccggcgaggtcaacgaggaggtccgcaccaaggcgggcatcgcccctgaggatgtcatcacctgtcgtcccgccgatttgctggagccggagctggagaagtaccgcgaggagttcaagagtctggccaagtccgacgaggatgtgctgagcctggcgctgttcccccaggtggcgcccaagttcatcgaaaagcgtgaccaccccgctgccgaggcgcccgcagctcccgcggccgcccccgccaagcccgccgatgataatgccgtccgcgagctgtatgtggagtggaaaaactgacagttcttctttcctttcccgcagagagccggaaaagcccccgcttttccggctctctccctgatttcaaagaaatcctgttcttttcgcaaaaaaagcttgcaatatcggtgcacatcgactataataacaccgttaacaggatatgcacctttagctcagttggtagagcacctgactcttaatcagggtgtccagggttcgagtccctgaaggtgtaccagtaatagcgaatcaccgacccgaccgccggtgattttctatacggcccgttggtcaagtggttaagacagaggcctctcacgcctttaacatcggttcgaatccggtacgggtcaccaagttcaaactccgccttcggcgggatgatttagctccatctttatgatggagctacttttttcgacaggaggtttttatgtccaagctcatacggctgtccgatcatttcacgtatggcaagctgctgcgcttcacgcttccctccatctgcatgatggtcttcacgtccatctacggcgtggtggatggtctgttcgtctccaatttcgtgggcaaaacgccctttgccgccgtaaacctggtcatgcccttcgtgatgatcctgggcggcatgggcttcatgatcggcaccggcggcaccgccctggtgtccaagctgctgggcgagggcaagcaggaggaggcccaccgtaccttctccatgctggtactgttcacactgctgttgggcgcagtgctgtccgccgtgggcatcctcaccatgcccgccgtgtcccgtctgctgggcgcgtctgatgccatgatggccgactgcattctctatggccgcatcgtcaccggcttcaccttcgccttcatgctgcaaaatgtgttccagagcttcttcatcgccgccgaaaagccccgcctgggccttttcgtcaccgtggccgccggcatcaccaacatggtgctggacgcgctcttcatcgccgttttcgactggggtgtggccggcgcggccatcgccaccggtctgagccagtgtgtgggcggcgtactgcccctgatctacttcctgcggcccaacaccagcctgctgcgcctgcggcccgccgcactgcgtctgcgccccatcctccagtcctgcggcaacggctcctccgagctgatgagcaacatctcctcctccctggtgggtatgctctacaatttccagctcatgcgcctgatcggcgaggacggcgtctccgcctacggcgttctgatgtacgtccagttcatcttcgtagccatcttcatcggctactccatcggcagcgcgccggtggtcagcttccactacggcgcgcagcaccacagtgagctgaaaaatctcctgcggaaaagcgccctgctgatggccatcggcggcgtgaccctgacggtcctggcccgtgtgctggccgcccccttgtcccggctgtttgtgggctacgatgccagcctctacgctctgaccacccatgccttccggctgttctgctggtcgttcctactggcaggcttcaacatctttgcctccggcttcttcaccgccctgaacaacggtgccgtctccgccgccatctccttcctgcggacgctggtgttccaggccggctccgttgtcgtcctacccatacttctgggcgtggacggtatctggtgggccatcaccgccgctgagatctttgcctttatcatctccggcgtctttctggtgctcaagcggaatacgtaccactatatgtgagcgttttccccttgcaatcgcataaacatagtgctatactatgtttactaacacaagggaggtcttcccatgctcgtatctaccaaaggccgttacgccctccgggtcatgctggagctggctcaggacgacagcgccgcctatctccccctgcccgccattgccgaacggcagggcatctctgaaaaatatctggagagcatcatctccgtgctgtccaaggccggcctggtggacggccttcgtggcaagggcggcggctaccgcctgaaccgccccgccgccgactactctgtgggccagatcctccgcctcaccgagggttctctggcccccgtcacctgccttgagggcgacgaaaacacctgcccccgcgccggtcactgcaccacgctccccatgtgggaaaagctggacaccatcatcaacgactatctggacagtgtctccctggccgatctgctgacgcagaccgacggcggcgccctctgaaagcataccgaaaaacctcccggaccacacagtccgggaggtttttgtttttcaggtccgactcagcccttgtgctccgtcttggccgtatccgtcttgctggcagtgtcggtcttattggcggcagcatcctccaccgcagagacattcgcggcagcggccgcggcgtctgccgctgccttgtcctggatacggtccgccgggataccggcagcctcggcctcaccgcgggtcatggtgatgggcgcggcggagtcctccaccagctttgccatcagcagatagcggtgatgatcgtcgccgttcttgcacacggacagcaccaccaccttgtcgcccgcctggggcaggttggtcttgtccacgttcacgcagccctcggcactgtaaaaggcgttctggttggtgtcgctcttgtacttaggatcgctggccgccttgcccagcgcctcaaagaatgcgttaaacaccttctcgtccttgaagtcgtggtagtacaggatgtggctggtatcataggggatgcatgcgaagaacttataggtcagctgacggcccggctgatagatgtacatcacggcgttgtcgtcgaacttcagcgtctcaccgtagctctgcaaaccgccgaacatggtccggttggccatgttgtggccgtagatcaccgtcatggggtcgctgaggtcagacttgttgtagtacgcctggatgtacagcgagccggccttgttggtcttgccgtccaaatcgcgctgcaggtagtaatcgtcgtcatacccggtgctgctcttagtggacttgggactctgcgccagatagtggcccttgctgatggcgcactgggtggcgttggggatctggatgaacccgaacacgtccgggtacttcttctcatcgaagctgacgccgtccggcagctggatgggctccggctccacgatgacctcatccttggggtccggttccggttccttctgctcgccgcagcccaccagcacggcagagcccagcgtcagcagcgccatcacaagcgccattcggcgtaaaaagtgcttcttcatcttctccattgctgctccttcccgcggctcctctcttcctctcgagccgctgcggcgtgtccgccgcgtcgcaatatactttgatatgataccatacagcgtccctgattgcaagcacttttcctctatccgccccttatgccagcgtcatgccgtactgccccagcagcttctcaagccgctgccgctgcgccggtgtcatgcgggccgtatactgcgccgccagcgcctgggccagatcgccgttgccccgcttcagatagttccccacggcccgctgcaggctctccgccgccgtagagctcaggctctcgctcctgctgccggtatctccactatctgtaagacggacgccggaggcggaaagtttcctctcctgctccgctttgtcggaaaaatgtgccagcagcgcctgatacagtctctgatcccggctgcccgcgtcctcatacgccgcctgagccgcctccagctgcttctgccagtcgccacgcgcctcctgccagcggtcatagtccgccttttcctgcgcgtccagcatactgtactggttctgcaaagccttgccctcctgctgatactccgccagcgccgcctgccgcagctccggcaccatcgctgccagttcctgcaaatagccgttgtacgcctgctgccccgcgctctgggcgtagctggaggcatacccgccagtcagggccgccgccttgcccagcgtgtcctccatggccgccgcgccgcgggcggcatacagtctggcataccgctggtacgactcgtcctcctccggatcgtagtcaaaggcctcccgccccgcgatctggtcatacagcgcctgcaaacgctcctcgaaccgggaccggtacgcctccggctccaacgccgccacgctgtcccggtaggcctgcgccgccgtcacctcgtccgatggcgtatagcccctctccagctcctgcagacgccgcgccgtgcccgccgtgacctccgccctgggtgccgccgcctctgctgccgcagcagcctgcgccgcctgctccgccgccgtaggcgcggacagcaggctcccccacgtctcgtcgccggcaatgccgtccaccatcgtcagtccgttcttcttctgatagtcccgtaccgcggctctcgtcttcttgccgaagataccatcctggtccagactatacccccgcttgttcaattcattctgcagctgccgcaccgcgctgccctgtgaaccgtatgccaccatcgtatacgtcgatgccatgcctctctcctcctcgtcatgtcgtgcgccgccagccatacacgccggcgatgcctgtctccacgctctcccacgctgcgcctgccggtgtctccggcgccgcagggctgtctgtcaggcgcacgctgcccaccgggaacagcatcgcctccactgtctgtccgttcaccgtcagtgcgccggataccgccacatccccataaaacaccgccggccacacgcactccagcgcctcctgctccgcatatttgccgaaggccgcgcccattccgccggcgcgcagatgcagcgtcacccggctggtggccgccgtataccgcaccacccgcacgttgcccaccgtgtcctccgcgctcagctccacctcataggaggtcccgccgtccagcccgccgcccagcagctgctctgcccccggcagcaatgtcacatagccgttccatgcgccgcccacgggccggaagcgcgcccgcaggaccaccgtattgtgcccctgcacatcggcgcactgtgccgcgcactttaccttcagatacgccccgtcgtccttctctgtgccgtccgcggcgcaccgcgccgccatggacgccgtgatggccggcggatagtacgccgccaccgtcaccgcctcgcctgtcacggtcactgaccgtccccggctgtccgtcaccgtgaccgtgggccgcagcgtcccgctgataccgatgaccgccgtcgtcccggtcgtgccggtcagctcctgccccgcaaagcggaactgcaccgaccgcacggacgcgccgccctgtgccgccgccgtcgccgcgtaccgtatccggctgatgccctgcacacacagcccccagctctccgctgccgtaccgtcgtttaccacctccgtggtcagcgccgccgtgggccgcatggtctccggcacatacgccgtgaacgccgcgctcagactccccaccggcgtaccgccgctgtacaccttcaccgtcaccgtcccggtgccgtgcgtcgtctccggcagctccccggccagcgactccggcaccgtccactgatacaccacgcgccccgcgctgctgctcaccgtccgcagcgcgccgccgctcagcgttccggaggccgaccccagtgcgtagctgaacgtaaagctgtacccatacccgggccgcgtcagtgtcagcgtccctgtctgtccgatcaccgcatctcccgccgtcagcgagaaatctccaatgtcctccacgcgctccaccggcagcgcatagccgtaactgtcgtctctggcagacccggagccgctgtacagccgtatccccagcggcgcggtgcccaccgcccccgccgctgttacccagccgctgtcgtactcgatcgcgctgctccaccggctgggcgatgccgccttcagcgtatgcccgctgcacacacttccgccgtccaccgtcaccgacagatagatagggtacccaaaatacgatgcccctgtcagcggcgccaccgtcacatagatcctgtactgcatcacgctgccgctgcgtcggctgtcatagccgaagctgacgccgatcttcggcacgccgccccactggatgctgtccaacgccgtatagctcacacactcaccctccgatccaccggaaggccagtccgccctccgccgcctccatgctccactgtcctacatcgataccgcccagcaccgtaatgttcgtgatgtacagccggttgttggacacataggccacctccgtggcatcctgccagaaggacagccgcgtggcggtgaacaccgcgcgaaagttgttctgctccaccaccttttcgccgtccacctctctgcacgtcaggtcctgtcccacagccacgccgtacaccggcgcggccccgtcgtagtacacgatacccgtgcggatatacccctccgtgtccagcttatagtgtgcaaaggccgcgtccaccttctccacgttggcctgcaggtcagagaaaaagctgtaatactgcgtcaccgcctccggtgccgcctccagctgggcgctgagcttcgccacatagctgccgaagtccgagctcgccacatactcctcctccagcttcgccgtcaatgccgccgtggtcttctgtacctggtccgccgtcttcaggatcatgctccgcagcgtctcatactgcccgtccgccgtctccgatgccgccgggcccaagcgcccgttggcctgccgccgggcggaggcctcccctaccccgccgcccagcgcctccagctgtcccagcgccaggttgagctgctgggccatctgcaccagatacgcatactgctgcgtcacctgctcctgcaccgatcccgccggtgccatcggcagggcaagcacgctcatggcccgtcacttcccttctcatacaccgctgccgcgctgtacacccggcacggtccgtccccggccagcttcagccgcaggtgtccgcaccgccggggccgcacctgcagcaccgcgccgcgggtctgccccgcctcgccggatacaccgcccacctgttcccagacgttgtccccgtcatagcagacgtacgccttcaccgtgctcccggccgccgccttcagccgcagctccagccgcgagagatacttgtgctccggcgtgtacagtcccaggtcgccgctttcggcgctccaggagaaccccgtctccgccgttcccaatgtaccgcttgtatccagcagccgtccgtcgctgcacagtactgtcatctccccgttccaccgggcaaaggccaccgccgccgtattgtcctgtcggtgccacagccgcttctgcgtgtcgtacaccagcagctccgtctctcccgccgcgtccacggcggacagccagtaccggccgctttccccgccggccacgccgccggtataccgcttgtcgcccagcgcccgggatacgcacaccggcatacttccgtcaaaggcgtacaccccgtcgttccccagatagtacaccacaccgtccgccacggccacggtcctctccgcacccttccgcacgccgctgcacggcaccgtcacgatctggtgcccgccgcccgccgccggatagatgcgctccatgcagctctccttgaagaacaccacgccgcccatgcaggccgccgccccggtaaagggtccgtccgagcctctggcggcggcgtagctgtcggtgctcagccccgcaaagctgttccagttgcggaaatctcccagcgcgcaggcgtatatctcgttcaccgcctgaccgtccacgatgccgtacttgcacccccacagccggttgccctgctccaccacaaagtccatctccggcatcagccgcatcaccgtcaccgccgccgtctgactgtccagtgtccggcacagcgccggcaccagcacccagtcgtcctccgccgcctgcaatacgtgcaggccgttcagctccgccgcgccgcagcctgccaccgtcacgccgtccccggcgcggaagcccagtcccacgcccacggcggtgatctttgtgtacacctccgtcagcgccgtccatgtgctgccgtcataccgccgcatcacgctctccgatcgctccgtgtccagccacagatcccccgtccggggctcctggggcgcctccgtgcccgccgcgtagctgcccaggctctcccccgtcccgtcgcacagggtgaacgtcacctctcccgtggtggtccgcacattctccatgctcccgaaatccgtcaggtcctgggtattgatgtacttcttgtccggaaagatcagcagatacgcccccatgctcaccagctgcttccggctgtccgtcagcaccaaccccgttttcgcgccgttcacatacagcgccgtgccgtccacccagaacaatccgtccttctccgccatgccgttgggcttttccagctgcgtcaccgtccgccgcagtggccgcgtctccagcgccggatacccgctgctccacaggttctccatctgctccaggctccccgcgccgctgcccggacggcggtccagtcccccgaactgctctacgcctgcccgctgctgcgccgccgccttcagcttgggaaaatacatctccgccgccccctttcagcacagccgcagcgccgacgcgccgccctccggcaccgccgtcctggcccggtagtcccgataggtcagaaacgcgttgttccacagacccgccgcgctgttgtaccgcgccgtctccccgttggcatagtgcacctgcgcctccacatagtgccggtacagctcgtcaaagggcggctccgccgtcagctccgtctcctcggtcagcaccggcagttcccccgtctcccggcacagctcccgccgcacaaagccctccgcctgggccagccaccgcagcttctccgcgcgcgcatacccattgggcagcagcgcgtccacccggtccagcacctgctttgccgtcgtccttgccatggccgccacctcaggaagctctctcgtccacatagcgccgggccgcctccgccatcatggcggcgttttccagcacctccgccacgcacaccggcacacgcacctccacgccgcgcatgatcttccagctgcgtccgttgacagacacgatgacaaaattctcctcctgctttctgcctctgggcagcagcaccgttgtcattttctccttcatctcgcccttctcctttcctcatgtaagacctcgccccgccgtccgcccgcgttccccagggggcggtggcctcggcgtcccgtcagcgcggcgtggccgcgctgacggcggcatttcccgcaggggcggacgacccgtccgcccctgcttcacgctccctcagttcgccttatcttcgtccgaatagctgctgccgcactccacgcgcaccatgtactcgtcgtacaggatagccgcggcgtgtacgcccttccagcccacgctggagcgctggtccagcgggtcggcggtgccggagctgccgcggggcttcacgatgacctccgtgccctcgctcaggtccaccacgccataggcgcccttgcccaggaacaggcagccgtacacggcgcagccctgcttgccgccctcaccggggtagatgacctccttgtcgcccacggtgacggtcttgtccagcaccagcttcgcgtcggtgttgctcaccacccggcagcgggtgccgcccagcaccacatagcggcccgccagcgcgccggcggccacggtgccgccgttgaaggtcacgtcggtgctggccataacgttgccgttcaccttcagcgtgcggctgtcggcggccagatcctcgccgcgatagatcttcgcctccgtggtctccacgaagcgcacgccgtgcagctcaccgatctcgccggagaaaagctccgtagccccggcatactggtgggcggcgatccacgcctcgtcctggcgcaggtcaaaggccacgctggggtggatgatgcacacatacttgccgtcaaaggtgggcgcgttcatcttcttcagctgggtcgccgccttggccaccagctcgctggtcatgcggcagtccttgtccagcgtcatgcggctggtcacgtcggtcttggtgccgtcgctgccgatcttgggcgcgtagatcacctgcttgccctgctggatctcgtttcgggtcaccgtgtccagcgtcaggcccatgttgctgccgtggcggtcggtgatctccagcaccacgtcgtcgatggccgtcagatccagcatatccgacacggtggtgtagtcgccgtactgcgccagctccttggtgatgtagctgacggagataccgctgccgtcgggcgtcacgccctcggtcaggggcttcagcgccttgtcaaaggcgccgaacttacgccactccacggtcttgccgccgccggcaggcaggcccttcgtggccgcgaactggttgtgcaccagctgcggcttggcgttctccagcagctccatgccgtagtaggtcttcatctccgcgctcaggcccgccgtggtctgggtgttctccgcaaacatctgcaaattcatctccatgttttctctccctttctaaaatctgatcttctctccatcctgtactctcttccgtatcgccgccagctccgcaccgctgagccccctcgggtcccagcggctgacgcttctgcgccgtccgccgttctccgccacgcggctgccgccgctggcgatggcctgggccatctgctgccgcgcccggatcaccgcgaattccatcgcggcctgcagctgcgcctcctgctcccgctgccgcgccgtctccgccgcggccgccatctcccgcagcctctcgttctcctgccgcagtccccgcagccgtccgtccagtatccgccgcacccgtgcgtcgaattcccccttgtatcggccgcgtatcagcgtctcgaagtcctcttccccgccgggtaccccctgttccccgtcaggtacctgctgctccccggcgtcgggagccattccgcccgtctcctccgcagtctcctgcgccgtcttttcccgctcgtccatccgaactctcctccccgtggtaggtcacgacccgatctccaccctgtcagggtattgctgcgccagcagcgccagcccgcaccgcaccaacgcgaactcccgggcacagtcccctgtccccgcgatctccgcgtatcccggcgcgctttggaaccgttccagccgccctgtctcccgcaatctccccgccagcgcgtacaccagcgcggacgccgccgcgcatacgatgtccttcccgtactcgccgtacccggcgtggccccgcaccgtaaggtgcgcgccgccgcagctggcccgtatcatctgggccgtaccgcctgccgcgtggcctgccgctgccgtgtcaccgcgtcgctgctccggcgcaccgccgcttttccgccgctgctctcccgcttctccagctctcgctccagcgcctccgccagatgggtcccctggctcttgtccagcagcgtcaccgcccgccgcagcgcctccgtcagccacgccttctggtccgtctccttctgtccctgccggatgacctccgccagcgtgtccttgctgcggaactgcatcagctccaggcaccgcagcgcctgctccgccatatcgctgcggaagaaccccatctggaacagctgcagggccagctggttgtactccatggtctggtacggcgtctcgtcctgtgccatcacctccagatcgaactccggcacgcgatagcccccggtcagcagcgccctgggccgcaggcccccgttgccgtaggcgacgaacgccccgccgtcccggcccagcagccggaactgccgcggcacgtcgtaaaactgccggatcagctcaatgcacagcgtcaccacctgtgaaaacgcctcatacccgtcgtcgatcatgttccgcgacagcttgccgcccgcctcctgcaaagccgcaatagccgtggccgccgtcacgccgccggcggtgccgccgctcatcacgtcccggttgcccgccgtctccttcatctccgcgatcttgttctgcagcaccgccacatacacgctgtccagcgccggcacccggatcggtgcgatggagtccgcacccaggttcccgttggtgtgcacgaagggcctcgtccagtcggcatactcgttctcgttcaccgcgccgtccgcccggatgaaaaaccgcggcgtcgccgccgccagcgtgtttttcagaatagcctggttcatcaggtcgatctgcttctgcgccgacttgcacagatccacatacccatacccgcagggcgtcccctcctcgggaaacagcgtatcgaacacgaacgggtacttcccgtggtcgtaccagccccgcgccgccatctccgggtcgttctccgtggcatacagcacattctcccccacgaacttgcagtactgcagcacctgccgcccctcacgctccgtgtggtagtaccagtccaccaccagcgactgctccgacgtgtccaccttgtcgtcgaacagataccggctcacctgcgcgccgccgcgccccagcttcccctccagctccggccatctccgcaccagatggttgttgggcaccagctccgtgcagaaaaagtgctccgactcctgtatgtccgtgacccccggctcccaaaacaggttcagcacgtccatgctgcggatgctcacgtctcccagcccgtgcagcttttcgttgtcccagaacacgccgtacacggcgcacccggacttcagcttgtcccaccatgccttggaatacgtccgcctgaaccggtcgtttttcagcagcaccggcaggatacggctcagcgtctctgcctcctgccggtctcccggctcccggggcagcaccgtcggctccggatagcagtccatggcgtccgcgtgcttgctgaggatgcagttcaccagccagccgctggccggccgcacgtcctccggattgccgccctcgcccgccttctccatctgctcccagtgccgcagcttccagaactgctcgttgtcgatgatgcgcctgtccagattttgcttgcccgcgcgatagcgccgcagcacctccgccgcggcccgtaccgcctccgccccgatcttcaccggagcaccggcgtcccgcgcggtccttgtctcctgctccatccgagcacctccctttcatgttctgtccctgcccccgtccagcccgaaagttgcccgcaaacgtgcaacgcccccaaattttttgtcccagccttcccaccaaaaaaagcgcaaaaaaaagaaagcccttacgggctttcttttttatttgctcttagtgacgctttttagcggtccacgccatgccggtcacggacagcactgccgtcaccgcgtagatacccacacccgcgtcaaaggtcttgggagaacccttggtggtggtatcgggggtggtggtgctgggggaatagtagtaataggaggtgggcttggtgtaggtcacattgctttccttgctgtacttagtgccattgatggtcacttcgcccttgaccacggtcagcgtatcgccgccgttcatgctgtttaccgcgctctcgatgttcgcagcgccgacgtagtagacgcccttgagagaggctactgccgtgccctcggtagcataggcgctgacgtcatcagcgaaaacgccgccggaaataccagcagttcctgtgtacagcacatcgccattctctcccttataagtgacctcaagcattttctgcctatccgccgcgcgttcaaacgtaccgtttttgattgtcagctcgcctacggctacgttctctgcatattttgccgtgaacagcaccgcatccgcagaggacagcgccttaaaagagccgccgttgatggttgtcttatgccagttcataacaacgaactgggatgtattagagaaatcaccgccgttgatggtcagcacacccgcttcatcgttcttgattgcatttaagccgccgctgaatgtgccgccattgatgatcagggtagatgcactcgttcccccattgcggatcatgctggaaaagtggcccacatttgtcactctaacgccttcattgatggtcatcgtagcgccattatcgctcaaaatggtataaaagctgttttctcctgcactacccttattgttttcaggatcttccttactgcgggtatatgtaccaccgttcagtgtcgccgtaccgttgttcacgatagcagcgcgctgatgggtcacattgtccacagtgccggtgccggtgatggtcagagtaccgttattggtgatggtatgctggccatccgtattggtcagcgtgtggccattcagattcagcgtgacatccttgcccgcagcgatagtaatgctggcagtgatgttagcgcccagcttgatggtggtcacgctgctgtcattcaaagcctgttccaattcctctttgctattcaccgttgcttcgccgcctgcccagacggtagcggtgagtcccagcgccatgaccagcgccaaaatggttgccaatatctttttcattttccttaccccgggttttttagatttccgcagggtgcttcgttttaacaagcttaaaacgccaaagcaggagtactcctgcggataatcagattatagcacagctgcataatttgtccagcctttttatggaaattttacacattttcgtcgtctgcggaatttggaccgggggaggggcgcagcccctcccccggtttctcacggctcccgccgtatctccgtcctctcccggggcgcgatgggccgcatcatgcagaaataccggctctcgtccgccgcgtggtcctcctgtcccgtgtccacatcctccggcgccgtggtgctgtacgacagccccggtaccgtccgtatgaacgcccggcagttttcgaacacatacagcatggggtacccctccccgtcaaagctcatccggtagtgcagctgcatccaccccggtatccgccggttgtcccccttctcaaagaacagccggtgcttcagcgccgtctcatagatgctctcgccccggctggcgtcccagatggccgggtccgccaccccccgtatggtccgtccccgcagatatgggtgctcgtcctccatccgccgtatctccgcaaactgccgctccggtgtccacagcacgccctcgtccggcgttcccgtgcagccgtacagctccaatatccggtacacgcacccgtcgaagtccaccgcccaccagccgcaggaaaagggcttggcgtaaccgaagtcgtagcttctgtacacgttccactcccgcgggatgtcaaagggctggatcacgtgcgtccaccgccggtccgcgtagtgcgccgggtcgtccgtgaactcctggaacacctgtcccgccagcacgtcccaccgcccctccagccacgccgcccgcagcttcggcggcagcgcctccagctgccgtatatactccggctgccgcgccagcagcgccccgttgtccgtcacccgcgccggtatgaacgcgtactcgcccccgttctcccccggctcataccgccggtcgataaacagccgcttgatatacccatgccccggcccgcccgggttgcacgtgtagtaaatgcgcttgggaaatccgttcacgccgcgcacgcacgccgccagcttccgcatccactgctccttcagctgcgtggcctcgtcgaaaaagatcacgtcgtactccgcgccctgatagcgatccgcgtcccggtcgcaggcgcagtatccgaactgcaatacgctcccgttcccgaacacgaaccgtctctcctccgcccggtatacggccgtacccgccagctccagccgcagcgtctccaaatggtttgcctcgatctccggcatggtccgccgcaccagcagcatccgtatccccggataccgctgcgccagcagcttggccttgcaccgcaccgcccagcttttcccgccgccccgtgccccgccgaaagcgacgtacttctttttgcaccgcagaaattcgtcctgctttgcgttcggcgtcccgatgtatatatcctccatgttctctcccccttgtctctcttctctccgtgcttactcgctcagctcccgtaccccctctcccatcagcacctgcaccgtctgcgccgcggtcccgccgcccagctccttctccagccccgccagcgtctgcaatatccccgccagctccttcagctccttggtgcacgcctcacctttttccgcctcctcggccgcccgcttcgcgccccgcatcagcgcccgcgtcatttccagcaggcaatccctgctctccgccctgcgccgtctctcgttccggcacccgctgacccagttctccttccgcgcgtgccgccccacgctctgcaccgaaacgccgtattccttcgccagctgcatataggtatatccgcccgcctcgtacttctcccgcagttcctcccagggtgccgccgtcttatgcatccgcctcacctccgaccacctcatacgccgccagtatctgcgccgcgaaatctgccaggcagcccctgcacacgttctcaccgctgatccggtagtatcgctctccccgccgcagctctccgccgcacaggtcgcactgtccgcacaccgcgtccgtcccgttctttctgtacttcatatccgtacccccttatcaagatcgtctataccccattccccggaaagcaaaaaagttgcccgcaaacgggcaacacccccaaaattttcccccagccttccccttaagggcacgtcctcctaagccttccccctggggttcgcggtgttgaatgacaggccggtggtctgtcagatccgcgaaccgaccgacccgcagggagacaggtgcccccacagggggcggataaggtgtagccgcgcagcggcgtaaaacgcccccgtcccgccccgccccgccgcacagaaaaaagggccggcacccgccgaccctttttctgttctcctttagcccggaggccaggtcatatcccgccccgccagcacatggaagtgcaggtgcttcacggtctgtcccgcctgatcgccgcagttgttgacgattcggtagctctccacgcccagctccctgcagatcttggcgatgacctcgaagcagtgggccaccacaccgctgttgtccgccgtgatggcattggcgcagcagatatgtgccttgggcaccaccaaaaagtgtaccggtgcctgcggctcgatatcataaaaggcatagcattgttcgtcctcatacacctttttgctggggatctctccgtcaataatggcgcagaacaggcaatcgttcttcatggtcgcatctcctttcggatataatatagtatagtggtcgttcaacctgccggaaaaagtctgtcattgcgagccagtgttcacactggctcggcaatccgtctccaaaatgcacagctcttacattttgcagatttcagctaaaagaatacggattcccacgtcgcttcgcgccgcgaagcaagtgcccttggggtactcctcggaatgatgggaacgacttttccggtagtcttgcgcgttcttacttcagcttttctgccacgaaatcgtccacggccgccagcgcgtcgtccaccttcagcagatcggtgccgccgcccatggcgctgtccggcttaccgccgcccttgccgccgcacacggcggacacggttttaaccagatcgccagccttcacgccccgcgccacggcctccttgccgcacaccgccaggaacgtgaccttctcgcccacgatgctggccagcacgcctaccacatggggatccttgtcccgcaggaagtcgcccatcagccgcagggcgtttgcgtccagaccctgacgggtgccggtgatgacgtgcagcccgtccacggtcttggcggaggccagaatctgcttggcctcgcccatggacgcctcgctcttgaatttctccaacgcctgccgcagagccttcatctcgctggcctgctgctccagacgctccatcagcgtctccggcgcggacttgaagaactgggacgcccggttcagcagcccgcggctgcggcgcatgtcctccatggtgacctttccggtggtggcctcgatgcggcgcacaccggaagccacactgctctcgctcttgatgcggaaggggccggccttagcggtgttgtccagatgagtgccgccgcacagctccatggagaagtcacccatggtcaccacccgcacggtctgaccatatttttcgccgaaggtagccaccgcaccccgcgccttagcctcggcgatgggcagttcttcggtggtaatgagcagcccggacagaatagcgtcgttgaccagatcctccacctcatccagctgctggggcgtgatgccctcgaagtgggtgaagtcgaagcgcagacgatccggctccaccagagagccagcctgatgcacatggtcgcccagcaccttcaccagcgccgcgtccagcagatgggtggcactgtgggcccggcggatagcggcgcggcggtcggtgtcgatggacgccgtcacactgtcgcccacggccacgctgccgctgagcagcttgccgtagtgcatgaacttgccgcccttgttcttctgtacgtcactgaccacgaactccatgccgtcgccggtgatcacgccgtggtcggccacctgaccgcccatttcggcgtagaagggggtcttgtccagcaccaggatggcctccataccggacacgatctcgtccaccagctcgccctcggccacgatacccagcaccttcgcgccgttcaccgtgtcgcggtcatagcccacgaactctgtggccggcatgtccttgccgaactccacgccggcccagcccagatcgcccagcgccttgcgggcttcgcgggcacgctccttctgctgggtcatcagggactggaaggcatcctcgtccacagtcatgccctcctcggcggccatctcggccgtcaggtcgatggggaagccgaaggtgtcgtacagcttaaaggcgtcagcgccggagaacaccgtctcgcccttctccttgtgggaagccagcatctcgttgtagatgcggatgccgccgtcaatggtgcgggcaaagttctcctcctcggtgcggatgaccttggtgatgtagctctgcttttccttcaggtcggggtactgcccctcgttctcgtgtaccacggtgtccaccaccttgtacaggaacggctcgttgacgcccagcagcttgccgtggcgtgcagcgcggcgcagcagacggcgcagcacatagccgcgtccctcgttgctgggcaggatgccgtcgcagatcataaacgtggcagaccggatgtgatcggtgatgacccgcaggctcacatcccgtttgtagctctcgccgtagtgggcgccggtcagctcgctgaccttgtgggtgatgttcatcaccgtgtccacatcgaacaggctggccacgttctggcacacacaggccaggcgctccagacccatgccggtgtcgatgttcttctgcttcagctcggtgtagttgttgtggccgtcgttgtcgaactgggagaacacgttgttccatatctcgatatagcggtcgcagtcgcagcccacggtgcagccgggcttgccgcagccgtactccggtccgcggtcataatagatctcggagcaggggccgcaggggccggagccgtgctcccagaagttgtcctccttgccgaagcggaagatcctgtcctcgggaatgccgatctcatcccgccagatggcgaaggcctcgtcgtcgctctcatacacggagggatacagccggtcggcctccagccccacccactcaggggaggtcaggaactcccagctccacgcgatggcctcgtgcttgaagtaatcgccaaaggagaagttgcccagcatctcgaaataggtgccgtggcgggcggtcttgcccacattgtcgatgtcaccggtacggatgcacttctgacaggtgcagacgcggcggcagggcggctcctcctcgcccttgaaccagggcttcatgggggtcatgccggcgttgatcagcaggatagatttgtcgttctggggcaccagcgaaaagctgggcagacgcaggtggcctttcgtttcaaagaacttcaggaacagctcccgcagctcgttcaggccgtgatagggatggctcatagtcgttgtctcctttacaatgtatactaaaattctttttcgctctcgttccattggcgggtcatatccgccagttctttctccaggttcaggaagaaccgggagatatgcagcccgtccgccagggcgtggttcacgaacagcgacaccggcagtgtcgtccgcccgttgacggtcacatatttgccccagctgatgcggggattgctgtcgtccgggctctccgccgggtgctgcagctgcgagtagtgtacccacggcacgctggagacaaagaagaagctcctcacgtcgccgtcctcggtgagcgtgccccgctccagcacctctttctggcggcgctgcccctcggccacgaactcctcataggcaagattgccctccaccgtggcgtagacgtacacgccgtccggcttcatggcggtgtaggacggcgggcaccagtcgtactccaccaccgtgccgtcctccgccagcctgcgccgcagctggggcacggcattggccgcccgcaccaccgcatacagcatgctcaggaaaaacggtcgctcgccccgggcggccatcatgtcggtgatgtccatctctaccgtcagcccggcaaaggggaacgtcatcccccggaagtaggcaaactgcccgcagcggggatcctcctccatattgataatggtatagtgcatctcccacctcctgcaacgaaaaacgcccctgtttgccatagcaaacaggggcgaaaatcacttccgcggtaccaccctgatttggcggcgagccgccctctcagtgccctgtaacgggagcatcccgtgccattcatcacggcaggctcaaaagcggctgtcaccgtgccgatcccaacgggcttgcactgtccccgtctcgctccgggcggcctccggtaactcttctctctcatcgccattatggaatatagcgttattttaccacaatgttccccattgtcaacacgaaatttctctttttgtgagatattcccccttgtctttccgcactgctgtggtatactggaaaccgtcatttttacagaaagagggacctcccgtgcaaaagctctcccgcaacgaccatatcgacctgtaccgccacctatccttctgtgccgtgggcggcttcttcggctgctacgctgtccttatccacagcggcgtcatgggcaacgcccagacggtgaacctgatcgagctgctgctggacgccctgcgcggcgatctgcacgccgtgctcctgcacctgggcgcgctggtactgtacgtgctgggcactatgctgacggtgctgctgccccactggtggggctgggatatgcactatgtatcgcccgttatcaccgccgcagccgccgtgaccgtggccttcttgccggaaacgctgaacgttgtggtggctctgtatcccatcttctttgccatgagcatccagtggagcagcttcggcggcgcccgcggcttttacagctccaccatcttctccaccaacaacaccaagcagacttctctggccctggccaactacctgtgtgaccatgaccgcgcccacctgcggaagctgaaggtctttgccctcaccctgctgtgcttccacatcggcgcggcagcggcctacttcgccgtgacgtggtggtatatccgcggcgcgctggccgtgctgccccttatcgcctgggccttcttcctgtccgtatgcgaacgcaggcatgaagccctggccgaggaaccggagaccatccccgacagcagcgcccaccccaccagcaacgcataaaaattgtcccccgtcttcgccgggggacaatttttatgtacttatttcccactcagcgccaccgcgtggcggatgaagctcatgggcggcactggacggggcagctgcatggtgaacaccatctggggcgtcttcggctccgccaggccattgccctcgctgtcgcgcattaccggcacggtgatcgtaaagggcttcgtatccggccccaccacctccacgatgtcgccggcggcaaatttgttccgcaggctcagggtggccagcccattttcatcacagtttgtcaccacggcgcaaatctgccagtcccgcagataccgggcgctctcataatactgccccggctggccgtagaaaaaacctgtggcgtagtgccggtggctgatgtgctccacctcatcccgccacaccgggtcaagcgggcgccctgcggccacgtcgtccagacagtgccggtacgcgccggtaacgatggccgcgtagtaagcggacttagcccgaccctcgatcttcaggcagtccaccccggcggccatcaggtcgtccaggtggtcgatcatgcacatatcccggctgttcataatgtatgtgcccttttcgtcttcgaacaccgggaaatactccccgggccgtttctcttccatcagcgcatactggtagcggcagggctgggcacattcgccccggttgctgtcccgtccggtcatatagttgctcagcaggcagcgcccggagtagctgacacacatagccccgtggcagaaggcctccagttccagctccggggataccctggcccgaatggcggcgatctcctccaggctcagctcccgggccagcaccacgcggctggcacccaaatcgtaccaggcctgggcgcagacgtgattggcgatggactgctgggtgctgatatgacgctggcagtggggcgcgtacttccccgccagggtgaacgcgcccaggtccgccagaatcagggcgtccacccccgccgcgtccagcttttccagatgggcgggcagggcctcagcctcattccagcggggcatggtgttcaccgtggcgtgtaccttcacgccgtggtcgtgggcaaaccgcactgccttcggcagtgcctcgtcgtcaaagttcccggcaaaggaacgcatcccaaaggacgtaccggccagatacaccgcgtccgcgccgtacagaaccgccatctgcagcttttcccagtccccggccggggacagcaattcaggcttctttcccatggcgtcaggagtagatgggctggtattcaccgctgttaatgaacttcaggtgctcgttatagtcggtaaagaagtggcttttgccgtccttgcccagggcgaagaagtaataatcggtgtccgccgggtagatggccgcctcaatggcggacaggccgggattgcagatgggtcccggagtcaggccggggttgatataggtgttgtagggactgtcgatctctgtatcgaaggtcttgaccccgtcgtgcttcatgatatagttgatggtagagcacagctgcagcgctcttccgcccttctcactgctcgggttctccagacggttgtggatgacggagctgatgttcttgcgctcggtgtcgtcgccgatggactccttctcgatcagggatgccatggtgatgatctcctgcagggagtacggagacgccttgatgtccgccagcatctgctggctgatgctgtttttgaagtacaccagcatcgtctccaccgtatacaccgcggaccggttcttgtcgaattcataggtgctggggaacaggaagccctccatgcgatcgatgctgcccagcttgtcgctgtcgaggaagtcgtagtcctcatactcgaagttggcgcaggcatcctccagatcctccttggtggccacgcccttctccgccagcagatcgatgatctcccggacggtgtagccctcggggatggtgaccttgatcaggccctgggcctccttggcgtccgtctcccagtcgtgcatattggtaatcagggcgcggaagtccatatcactgttcagcttgtaggtccccggctccacgtagcggttgtagtgcaggaacgtgccggcaatattgaacaccagtcgggaattcaccagccccgcgtcgtgcagcttcttggccacatctccccggctgtcaccctcctctacggtgatctccacctcggtatagggcttgttcagcgaacacacgtcgttgaccagcagccaaccgatgcccgccagcaggcaggataccagcactacacaggccagatagatgatggtccggttgcgcttggcctgacggcggcggtcactgtggcggcgctgctcggaggacgcctgccggcgaacctcctcggcgtcccacttcgccgtggcgtattcgtttcgttcttcacggtttcccataagtctttgctcctttcccagcgtcagccgataagatcggccacgcaggtcatcacttcgttgtgtatgtcgtctatcaggcgaggcgcgcccgcccgggcacagtcaatgcgcgtccagccgcagcgtgccaccacatgggcggcgttttcccggcagcggcgcaggtattcctcgtccttctcgtggatgtcagcagtggtgtgggtggcggcctcccgcaggcgcatcatctgttccgtggcctctgtgggcatatccagatacagcacccgtgtgggctccggcagccccaacagccggtactcgaagtcaaacagccagtcgagaaaaccgtcccgctgctccggcggcagcttaccggtctggtgaacggcgttgctggtggtgtatcgatccgcaatgaccagtccgccctgctcatagtacgcgccccagtcctgtttgtaggaggcatagcgatccacagagtagaacactgacgcggcataggcattcacgtcgccgggcttgtctccgaaggcaccgcccagatacaggcggatcaacgcagaggactcctcctgataccgggggaactccagcttgcggaaagggataccgcggcgcgtcagttcctcgcacagcagccgggactgggtagccttgccggacccgtccgtcccctcgaacacgatgagttttccctgcacagcgctcgcctcctttggacacactgacccataatacagggtattgtaccacagttttccccatttgtaaaccattcaaacgggcccgtcccctgcaaaagggccgccccctccgggacagcccctgatacgctattgcacggcggcctttttcttctgcttctcctcatagacggtgttcagcacatacaggaggacacccgtccagataaacaggaagctcacaagcttctcgtgggtcagggcctcgcccatgatggcaccgcagataatagacagagacgggctgatatactggcagatgcccgtggtcatcagcggcagatgcctaacgccgatggagtaaaacaccatgggcagcccggtgatcacaccgccgccgatcatcagcagctgcttgacgaccgtcatgctgcccataccattgtcccccatacggaaaaacaggatgaacagcagcgccaccggcaccatcatcaggatctctgacgtggtagacacgatggaatcgatggtcaagctcttcttgatggctgcatagatggaaaacatcaacgccagggcgatggtcacatagggcacgccgccgaagccggaggtgctgaacacgatgccgaccaccacgatggcaatgatcacaaagtgccgccaattcatcttctcgcggaagataacggccccaagggcaaataccaccagcggctggatgtaataccccaggctgcactccagcacgcggccgttctgcaccgcccacaggtacaccagccagtcgccgaacagcagcaccgatgcaggcatctcccgcttgagcacctgcttgtccttgaatacggcccacagctgcggcagctttccctgcaccttcagaatacacaggcaggccaccgctgcccagataatgcggcaggccatgatgaaaaacgtgtcgatctcgccgcacacattggtgcacatataccagtacagcggctggaaaccccagatgaaaaagcacaccgacatagcccccaggcccttgcggtagttgaccgtttgcatacgtttcccctcactttcctacagaaatcgggtagtttccccatttacagcgtccaataaccatgatatgataacacctgcaacgcggaatagcaagccatatttccccggaaaaggaggtttcccatgctgctgtttgacatggacggaacgctgatcgactccaacggcatctggaaggacgtggacacgcgtttcttggagaagcgaggtctgccctatacgcaggaatactatgagggcgtggcccacaccatcttcccgctggcggccaaattcacaaaggaattctgccatctgccggagagcgaagccgccatcatggccgagtggatggagatggccggcgacatttacgccacggacgtaacggaaaagcccggtgtccgcgcctatctggagcagatgaagaaccgcggcgagcgtatggctgtggtcaccagcgcggtccctgttcattgccgtacggcgctgacccacctgggcctgctgccctatttcgagcgtattttcttcgcccaggagctgggcaccgagaaaaagtaccccgccctctgggagaaggtcgccgctgcactgggcgtctcccccgcagactgcaccctgttcgacgactccgtggaggccatccgcggcgccaaggccgccgggatgcacaccgtgggcgtggcagacccctactttgcctccaccgctgacgaaatggcccgcacctgtgaccgttacatctccagcttcggcgaactgctttatccttgacttttgtcgaacgatttactataattagggttacggcgccccatgcgccgcttattatgcgcggctgcccgcaggcaggaccgcttgaaggagttttgtatcatgcctgtttatcccatggacatcgctgggctccaccgggagctgcctatctgtaaggtcacggacgacctgtacatcggcgccttcatctgctttggcgacgcggagctgaccgtagcctgcgcccgtgatatgctggccatgctggaggcagacagctacgactatctgttcaccgccgaggccaagtccatccccctgatccacgagatggcccgtcaaagcggtgcgaaaaagtatttcatcgcccgcaagggccccaaggcgtatatgcccgatcccctgcacgtggaggataaatccatcaccaccgccggggtgcagaagctgtatctgggccgtgacgacgccgacctgatccgcggcaagcgcatcgttctcatggatgacgtgatctccaccggcggctccctccacgccatggaggagctggtgaagatggccggcggtaccgtagtggaccgcatcgccgtgctggccgagggcggtgcggcggaccgcgaggacatcaagtacctgggtgtccttccggtattcaacgccgacggaagcatcaagtaaagagaagcgcctataggcgcttctcttttttgttctcattagcaaaaccgcatgaccgccgccatctgccgcacattttttatagcgtgtggggatagacttttatgataagttatggtaatatgtagaattaataatactaatgctttgagtgggagaaaggagcagttccattatggcagtaaaagagagctatgccggcaagatcaaccggaagctgacaaaaaagctgcgggtcatcgccgtggccgccggccgtgaaaaggccgacctggtgctgaaaaacgccacctatgtcaacgtattctccaacgagctgtgtcacggcgacatcgccgtggccgagggcctgatcgtgggcatgggtgaatacagcggcaatacagaggtagatatgggcggtaagatcgtcctccccggctttgtggacgcccacattcatctggagagttccctggtcagtcccacggagtttgccaaggcggtgctgccccatggcaccaccaccgtcatcaccgacccccacgagatcgccaacgttatgggcaccgatggcatcgagtatatgctccaggccaccgaggacctgcccgtggacgtgcgctttatgctgccctcctgcgtgccggccacgccgctggacgagtccggcgccaacctggactaccgggctatcgacagcttctatgaccatccccgtgtacagggtctggccgagatgatgaacttcgtgggcaccatcaacggcgatccccaggtggtggagaagatcgtggccagccaggcccatcacaagaagatcgacggccacgcccccgacctggtgggcaacgacctgaacgcctacatcgccgccggcgtgtactccgaccacgagtgccacgacctgaacgacgccatcgcaaagctccagcgcggccagttcattatgatccgcgagggcaccgcagcccgcaatctggaagcgctggtccccctactgtgcgacaagtatgtggaacgctgtatgttctgcaccgatgacaagcaccccaacgacctgctggaaaagggtcacatcgactacatcgtcaaaaaggccatctctctgggcgccgaccccattaccgccatcaaggccgcctgccacaacgctgcccgctacttcctgctgaacaaccgcggcgccattgcacccggctatctggcggacttcgtcatcatcgacgactttgaccactttaacatcgaaaaggtctacaagcgcggcgtactgatggtagaccatggcgtggtggcggacttccccgtcccggagatcgacccctatctggtcaaccgtgcccacgacaccttccacgtggccccgctgaccgccgccgactttaccgacagccgtccccacgcggtcatcggtatggtcaacggcgagatcaccaccaccgacggcggctacaccgaccgtatcgatgtggactatgacattctgaagatcgccgtcatcgagcgtcataagaacacccaccacatcggtctgggctacatcaagggctatggcctgcaaaagggcgccgtggccaccagcatcagccacgacagccacaacatcatcgtagtgggtaccaatgaggaggacatggccttcgccgccaaccgcatcgtacagcagcacggcggcatcaccgtagtggagaatggtcaggtaaagggcgagctgctgctggccatcgccggcatcatgtctgacgacacgctcataaacgtgaaccgcgacttggagaacgccaaaaaagctgcctacgacctgggcgtgtccaccggtatcgacccgtttatgaccctgagcttcatggccctgccggtgatccccagcctgcgcatcaccacccgcggcgtgttcgacgtcaccactcagcgctacgtctgatacctgctccccgcttcgccgggacctatatccgcaaaaaaagaaagccctcgcgggctttctttttttgctcacagcttcagttcacaatccaggctcatgaccgcgctgccaccgatacggacggtcacggcgccgtccttttcatacagaaggctgcgtatctcgctgggccgactcatgtgctcgccctgcaaaaacacattctcccgctccggctccacatcgcctcgcaggtagagataatacgtcagtgcaccgttgctggtcccggtggcacactcctccgggatgtcgtacaggggcgcgtagttgctgcaccaggccgtcacgccgtcccgccccgggcagaacatatgcacgccggtcacatcgtacttccgtgacagttccgtgaccaccggtgcgttctgcgctgcccgcatgagcgtctcatggtcccggacgggcatcataatatccgccagaccggtggacaccattcgtgggatatatccctccgggcagtccgcctccgtcaggccataggcggcgtacagcgcggcgcgctccgctgccgggatgtcgccgatcagctgcggcggcgccatatccatccagacagtaccgcccctgacggtgatgttcagctccccggcctttgtgtgggcaatatggtcgccgtcgccgatcttctccagctgccgcagcagggcgaaggacgccaccgtggcgtggccgcacaggtccacctccccggcgggggtgaaatagcgcagggatacggagccgtccggctccatatgtataaaggccgtctccgagtgcttcatctccgcagcgatctgccgcatggtctcatcagacagctcccggtccggcagtgccactcccgcctggttgccgccgaagatccgattggcaaaggcgtccatcacatagagcttcatagggtatacctcccagtttttcttgtggttttcattatatactctcttgctcttaacggcaagtatatttgacttccgatgtatttttcgttagaatagaattgcagcaggtgtctgtgtgaacgcccgccgctaaaagcgaagaaaggaacttcatcgaaaatgctcaatgagcgaagtctgttatcacaatttctgcatttcgtagccgctacggtggcatccctcatggttttcagcctgtactccatcgtggacgggctgatggtcgccaagggcgtaggcgaatacgccatggcagcggtgaatctggcggtaccgttcaccaatgtgctgttctccatcggcgtcatcttcgccgtcggtaccagcaccatcatcgccatctatctgggacaaaaccaaggcgagaaggccaatagcctgttctctcagaacatcgtgctgctgacgtgcgtcggcctgaccatcaccgtcctcgttttcgtatttctggagccgttcgccgtgctgctgggcgcaaagggcgtaacgtatcaatataccatcgattatctccggggcctggcccctttcgcgctgtgcttcatcatctcctataacatggaggtgctgatcaagaccgacggctatccccgtctggcaattctgacggtcatcaccggctgtctggccaactgcgtgctggactatatcgccatctttgtgctgaatctgggcgtatggggcgcggccttcgccacaggtctttcccagcttctgacgtgcatcatctatctgcgccacttcctgggcggacacaacaccttccactttgtgaagttcaggatggactggggcatctacaagcggctaatcccgctgggctttgccgacggcgtaacggagctgtgcaacggcgtgatgatcttcctgttcaaccgggtcatcctccggtgcctcggcgacgacggactggtgtgctacaccatcatcgcctatgtgaacaccctcatcatcaacaccatgctgggcatctcgcagggcagccagccgctggtcagctaccactacggcaagggggacgcggcgggctacaagaagctgctgcggtatggctttacagcggtgggcatcatgacggcggtgatcttcgccggtgtgatgatctttgccccccagatcgccgggatcttcctcggcgcggagaagccggagctgctgggcagcgcggccggcgcgctgcggcggtacggtctgtgctatctgctgctgggcggcaacatcctcatgggcggcttcctgacggcggtggagcggccgaaggcggctatttccatctccgtgggccgcggcctgctcttccaggccggtgcgctgctgctgttggcggcagccgtgggcggcacgggcatttggtttgcgccggtgatctccgaggcgctgtgcgcggtaatggccgtgtggttcctccggcggttcctgcggaaaaccgcggcataaccaacataaaaagtatcccgcggcacagccgcgggatatttttttgctctctttaaggcgccttacgcctgcgcggccttttccgccgtcatccgccggatcacctcgtcaatacggtgggcaacgcggcagaaatcctccgccgtatagcccttggtggtcatggcggcggtgccgatgcggacgccgctggtctggaacggcgagcgtttgtccccggggacgcagttcttattcagcgtaataccgcagcggtccaattcctcctgtacctcacgtccggtaagtccggtatccgtcagatccagcaaaaacagatggttgtccgtgccgccggtaacgaccttgtagcccatggccatgaactccgccgccatcgccctgcagttgaccaccacacggtggatatacgttcggtactccggggtcagcgcctcctccgcagccactgccttgccggcgatcacgtgctgcaaagggccgccctgcataccgggaaatacggcgctgtccacctttttcgccagctccggccggcagaagatcagtccgccccgcgggccgcgcagcgtcttgtgcgtcgtggtcgtgaccacatctgccagtccaaaggggctggggtgctcccccaccgccaccagcccggcaatgtgggcgatgtccgccatgaaatacgcccccgccgcctgcgccgcccgggcaaagcgtgcaaagtcgatggtccggctgtaggccgacgctcctgcgatgatcagccgcggcttcagctcccgtgcaagcctctccataccgtcatagtcgatcaggccgttttcgtccacatcgtaggccgctatgtcatacagcctgccggaggcatttaccggcagtccgtgggacagatgcccaccgttggccagactcatggacaggatccggtctcccggctgcagcagcgccatatacgccgccagattggcggaggtaccgctgtgaggctgcacgttcacgtggtagtctgtgtgaaatacctccctccacttggcgatgcagtacgtctccagctcgtccaccaccaggcagccgccgtagtagcgcccctgatttcccatctcccggtgggcgggatacccctcggaatacttattggtcaggcagctgcccacggcgcggcataccgcctcgctggtgaaattctcgctggcgatcagttccaccgttgtttcctgccgccgctgctccatggcaatatagtcgaaaaccttggatgtcacacccatctctccccacgtattgtattattgcgtcaaccattataccacatatcgggccccatgcaaggccttatgtctaaataaccaaaatacacgaaatcacatacctgccctgtaggttttttgtaaaaaacacagaaaggtgaaaaaagggttgacaacagcgcgttaagggcgtattatgccaccatcccgacagggaaaatcacagaaggaggaaagccgacatgaagcgtaacgtcaccatgatgatgtgcgagatgtgcatgggtatgatgtccatgtgcatgtttcgtcgcgccgaaaaggtcatcagctttccgaaaactgtttgacggcttgaaaaaaagccgatgtgtaagcagacagcggagggtcagtgatgaccagccgctgtttttgttttgcttatgtaccgccgttccggccgggcggcggtgctgagataaaatcgtaaccaaccaagtttaatcatttcaaaggagactgcgaacatgaaacacaacactttgactaagatcatcaccctggccctggccgttgtcttggccctgagccttgctgcctgcggcagcaagaccgacgacaacagcggcgacgctgctgccaccaccatcaagatcggcgtacccaacgacaccaccaacgaagcccgcgccctgctgctgctgcaggagaacggcattatcaagctgaaggacggcgtgggcatcaccgccaccaagaacgacatcgtggagaacccgtacaatgtggagatcgtggaggctgaggccgcccagctgcccaacctgctgcccgacgtggactacgccgtgatcaacagcaactacgccatcaacgccggcctgaaccccgtgaatgactccctgctgatcgagggcagcgcctccgcctacgccaacattctggccgtcaaggagggcaacgagaccgcccccaagatcctggctctgaaagccgccctggagagcaagcaggtcgccgacttcatcgctgagaagtacgccggctccgtggtttccgtggtggagaaccccactgacggctatgacgcttccgtggactatgacgcgctgaagggcgagaccatcaccgtggctgcttcccccacgccccacgccgagatcctggaggtcgctaaggagatcctggccgccaaggacatcaccctggacattcaggtgtacaacgactatgtggtgcccaacaccgtggtggatgacggcaccgtgaccgccaactacttccagcacctgccctatctggaggacttcaacgcccagaacggcacccacatcgcctccgtcgccgccatccacgtggagcccatgggtctgtacggcggtaagcagaccacgctggacgcgctgagcacctccgcccagtaacataaaacaacaggattttaccctcctctccccctcgcgtgttccccgccctgcacagggcggggaacaccgcggagacaggacaatgcgaaacgcccggtttcttttccggagctcccgccagggcgcgggggatgcagaaaggaaacagcgcgaattaaacagaaacgaggaacgccgtcgtgatagaactgaaacacgtaagcaagacatacgactccggtgccaacggaggcgtggacgcattgaaggatgtgtccctgaccattgaggatggagacatctacggcattatcggtatgtccggcgcgggcaagagcacgctggtgcgctgcatcaacctgctggagcgccccacaaaaggcgagatcatcgtggacggccagcggctggacaccatgacccccgcccagctgcgcgccgcccgtcggaatatcactatgatcttccagcacttcaacctgctcatgcagcgcacctgcctgcgtaacgtctgcttccccatggagatctccggtgtaaagcgggccgacgcggaaaagcgcgggcgcgagctgctggagctggttggcctgcctgacaaggcggatgcctatcccgcccagctgtccggcggccagcagcagcgcgtggccattgcccgtgccctggccaccgaccccaaggtgctgctgtgcgacgaggccaccagcgccctggaccccaagaccacccggcagatactggagctgatccgggacatcaaccaaaagctgaacatcaccgtggtcatcatcacccatcagatgagcgtggtgaaggaggtctgctcccatgtggctatcctggacgacggctgtgtggccgaatccggcatggtgggcactgtcttcgccgcacccaagtctgaagccggccgccgtctggtattccccggcggcgcggacgcacaggtatacaacccccaggacgaaaagctggtccgcctggtgttcaaggacagcaagaccaccagtattcccctcattgcccggctggcggcagaggagggcgtcttctgcaacgtgatctccgccagtacccaaaagctgtccgaaacggtatacggcagcatgatgctgggcatccccagcgcacagtacgataaggccgtggcctttatccacaatgttgccaatgttcaggtcgaggaggtggaccaccatgtacagtaatctgttctccgcccagtccgtacaggatctgatgagcgtgctgccctctctgccctttgccatctgggagacgttctacgtcaccgtggtcagcacggcgctgtcgctggtgcttggcctgcccctgggcgtgctgctggtggccggcgagaaaaacggcgtcctgcccctgccccgctggctcatgcaggtcatcaacgtcatcatcaatctgctgcgctccatccccttcctgatcctgatgatcatggtattccctctctcccgtctgctcatcggcaccgccgtgggcaccacggccaccatcgttccgctggtggcggcggcgttcccctttgtggcacgtctggtggagagcagtctccgcgaggtggatggtaatatcattgaggccgcccagagcatgggcgccacccccatgcagatcatctgcaaggtgatgatccccgagagcgttccctccctgatccagaatgtcaccatcgcgctgaccaccattctgggctactccgccatgagcggcattatcggcggcggcggcctgggcaagatcgccatcgactacggctactatcgctataagtacctggtaatgctggtggcggtggtcattctgatcctgttggtgcagctgttccaaagcgtgggcacctggctcagcaagcggtgcgacaagcgtttgaagcactaatcccgtcttctgttcccttcggctttcgccgaagggaatattttttccgccgccccatttttcaccttgacatttctcccgaaatcgtgtatgatattcaaggttgtaaaggcatataactttacagaaggaggccacaccgtgaaaaaccagacataccgcatgaccatgctgttcgatttttacggcgatatcctgaccccacggcagcgtgagctgttcgacctgtattataatgaggacctgtccctggcagagatcgcggagaactgcggcatttcccggcagggcgtacgggacgtgatcgtccgcgcggagaacgctatgaccgaactggaggacaagaccggcctggtccgccgctttttgcagatgcagcagcacgtggaccgtatcatcaccgctgccggagacattaaaaccatcaactaccggcagtacgaaaatccccggttagaggaattggcggagacgatcttggacgctgccgccgccctgaaggagtaacgacccatggcatttgagggacttagcgaaaaactgaacggcgtattcaagcgcctgcgcggtaagggccgccttaccgaagccgatgtccgcgagggtatgcgcgaggtgcgtctggccctgttggaggccgacgtcagctataaggtcgtcaaggacttcgtggcggacgtcaccgaaaagtgcgtcggcaccgatgtgctggacagcctgacccccgcccagcagatcatcaagatcgtaaaccaggagctgacggcgctgatgggcggcaccaacgcccgcctgaccaccgcctccaagggtcccaccgttgtgatgatggtaggtctgcagggcgccggcaagaccacaaacggcgccaagctggcagggctcatgcgccgcagcttcggcaagcgccctctgctggtggcctgcgacgtgtaccgtcccgccgccatcaaccagctgcaggtggtgggcaagcagctggacatccccgtcttcgagatggggcagatcgacccggtgaccatcgccaaggaggcggtgaagtacgccgctgaccacggccacgacatcgtctttctggacaccgccggccgtctgcatatcgacgaggcgctgatggacgaactgaaggccgtcaaggccgccgtccatcccaacgagatactccttgtggtggacgccatgaccggccaggacgcggtcaacgccgccaaggcctttgacgacgcgctgggcatcgacggcgtactgctgaccaagctggacggcgacgcccgcggcggtgctgccctgtccatccgggccgtcaccggtaagcccatcaagttcgtgggtaccggcgaaaagctggacatgatcgagcccttccaccccgaccgcatggccgggcggatactgggcatgggcgatatgctcaccttcattgagaaggccgagcagcagtatgacgaaaaacaggcgaaaaagctggaggaaaagctccgcaagaaccgcctgaccctcaccgactatctggatcagatggagcagctgcaaagcatgggtgacctgaaccagatcgccgatatgctccccggcggcatggctaagggcttcgaccccagccagatcgacgagaagcagatggcccacaacaaggccatcatccagtccatgaccccgctggaacgcgaaaatccgcagatcctcaacgccagccgcaaaaagcgcattgccgccggctgcggcctggaggtggtggatgtcaaccgcctgctgaaatcctttgagatgctgcagcagatgaccaaagccatgaccaagggcggcggtatgcgcggcctgggcggcatgatgggcggcttcggcggcaaggtggccaaaggcgccatgcacggttttggccgaaaaaaacggttgaaataaagttaaaaaaagtagaaaaagtgtgtaagtgcagtcgcatttaacagatataaaacatttaatttacatggaggaacacaacaatggttaaaattcgtctgagaagaatgggcgctaagaaggccccctattaccgcgtcgtcgtcgccgattcccgctatccccgcgacggccgcttcatcgaggagatcggcacctatgatcccactgtctcccccgccaagatcagtatcgacgctgaccgcgcccgcgagtggatcaagaccggtgctcagcccaccgataccgttcgcgccctgctgaagaaggtcgacgtactgtaagtcgggagtgcgccatgaaggatctgctgctgtatatcgcgcagaaccttgtggagcacccggagcaggtcagcgtgaccgaggtggaaaacggtgacgagctgacgcttcagcttcgcgtcgcgccggaggacatgggcaaggtcatcggacgtcagggccgtatcgccaaggagatacgcaccgtgatccgttcctacgcccagcgcaccggtgccaaggtgtctgtggatatcgttgattaaaaaaggagcacccggcagggtgctctctttttgcccgctggccggggcaaaaaagaaagccctttcgggctttctttttttgctctcagtgacgctttttagcggtccacgccatgccggtcacggacaggacagccgtcacggcgtagatgcccatgcccgcgtcaaaggtcttgggcgagtcggtcttgctgtcagtagtggtagtagagttgtagtagtagcgcggcggggtctgcagcacggtaataccctctctgacagcgttggacacgacctgggaatcattagcgaccacattgtctgcctttacacccttggtagtatccaccgtagagggaatcgtgttgttctccattttaatgacgattttgggggtatccgttcccgaatccagagagccaccgtttgcctttacatcatcatacagcagatagccggtacctgtgatggtgttgttactgatgctaatatccggtgtgccgccagtctccaaagcaactttgtggatcgtaaatgcattacttccattaagagtcagatcattgttcttgatttcgattttgcctacacggcttatctgcacgcaggaataaccaggtgccacagaaatcgtattgttgctgaccgtggcctgtgcggtgttctggtcaacatttacaccacgctcatagccggagattgtattcccactgatgttgatattcagagattcggtagcgcttccctgtacatgaatagcagtagcgccactggtaccagtaccatccagtgtgctgttggtcacagcatacttgccgcccacattgttgtagttataaattctaagccccttgaccgtacaattgttcacactaaaatcaagcgcctcaaaataagactgtgtcgcccacaatccgttgggcgcacttcccgtgatggtcagattctcaaagctgatagaggtggtcaccgtctcaccccaccactcgtaaggcagagtgatattggaattgaccgtcaacgttgcgcccctgttctcatctgcacccgcaaacttaaaattgataaaatggaggtcattgccgtaatgcgatgcctttctgcccatggtcagcaaattcgggcagcttgtctcatcataggtcacattcccggaaatcttatacgtgatggtcgcgttgccgtcgctatccacatctgtgaataccgctttgaacgcctcgacagattttgccgtcccctgccccagtacatcagtatcgcaaacagactcaatcacaggtttaagcgcagcgtatgcagcttcaaacgttgcgaactcattgtcatccttgtcgttgtacttgattccatgcacaacaaccttccccgtatcctccgcccagctgacgctgcacaggcccagcgccatgaccagcgccagaatggttgctaacaatttcttcatgtctcataccccgtttgttttagatttccgtaggtgcactcgttttaataaccattaaaacgtaaatgcagaggtacctctgcggatagtcagattatagcacagtctcaccgtttgtccagcctttttatggaaattttacatattttttctgttaccgggaatggaaaacgggagaatttgacagaaaatgggaattggggggctgcgcgaaagaggagcccccaaacgggtgctcctctttatgtctctcacgcaaaatagcccttgatctccatcacggccgttacgatgcagaacaggccgaaggccaggatcagcgtgccgcccagcttctttttctgcttcacctggaacatcatgatacccaccatgatcatggacaagcccagcagcaccatggacaggccggggatgtacagcacgttcatcttccgcagcagccacagcagcagggccaggaccagcagcacgatggatatgtttttcttcgtattcatggacattggcgtttctctcctcccttgggacgcggcgcgcccactggtttgattgtagcggaaaagcggacagaatacaagggcaatttaccgccccagcagcactttcgccttgaggatcgccgccacggtcttggcatcggtcagctcgccggacatacacagctccaccgcctcgtcgaagggcacgcgcaccgtctccaaaaactcgtccgcgtccgggtgcgtctcgccgaaggtcagctcacaggccaggaacaggtacagcgtctcgccatagcagccgggagaagcgatcagcgcccccaggtccgtccatgcctccgccgtggccccgatctcctccttcagctcccgctgggccgtgacgaaggggtcctcgcccggctcccgtttgccggcgggtatctccgtcagcacccgggaaaaggcgtagcggtactgcttcaccagcagcacgtcgtcgccgtccagggccagaatgcccacgccgccggggtgctccaccacctcgcggaccccctccttcccgttgggcaggcgtaccctgtcctcccgcacgcgcaggatgcggccgcggtagacctcacggctctccagcgttttctcagtcatatccatagaagcgtctcccttcgttttttgccccagtatagcacagaaagttcaaaattaccacccctctatcccccttgcgcgatgcgagaaaatatggtatactatcgttcacgttaccggaaggaggtgtctccatggacaagtccggcaccaagaccatcgcccagaaccgcaaggcgtaccacgactacttcgtggaggaccgctacgaggccggcatcgagctgttcggcacggaggtcaagtccgtccgcgccggcaccctgaacctgaaggacgccttctgcgtggccaaggacggcgaggtgtacgcctacagctttcacatctccccctacgaccacggcaacatcttcaaccgcgacccggaccggcccaagcggctgctgctgcacaagcgggaaatacggaagctccacgacctacagaagcaggagggctatgcgctgataccgctgtcggtatatttcaagaattcccgggtgaaggtggagctgggcctgtgcaagggcaagaagacctacgacaagcgggaggccgtggccaagcgggacgccaagcgggagatggaccgcgccatgcgggagaaaaaccgcgggtattgaatggtatgacattgcgcgggaagtgcgcatattcttatgacaaagtgagggaaacggaatggcaaatcctatcgtgacttttgaaatgcaggacggcggcaagatcgttgccgagttgtatcccgacatcgcgccccagagcgtgtacaatttcatcgccctggccaacgccgggtactacgacgggctgatcttccaccgggtcatccccggctttatgatccagggcggctgccccgacggaaccggcatgggcggcccggggtactgcatcaagggcgagttcgccgccaacggtgtgcagaacgacctgcgccacacccgcggtgtgctgagcatggcccgggcgcagcccatggacagcgccggcagccagttctttatcatgcacaaggacgcgccccatctggacgggcagtacgccgccttcggctgcgtgatggacggcatggacgtggtggaccgcatcgccaaccagccccggaacatgatgaccaacaagcccaagaaggaccaggtcatggcgaaggtcaccgtggacacccagggcgtgacgtatccggagccggagaagctggccgatcccttcggaagataagttttctgcgcgggggaggctccccctcccccacacatatgtaaatattcccatgggttgtgtgcacagcgcgcaaaaaccttatgggctgtactgtttcccagtatcgcacaatgcgcaagtccctcacggactacgctgttccccagtgtcgcacaatgcgcaagtccctcgcggactacgctgttccccagtatcgcacaatgcgcaagtccctcacggactacgctgttccccagtatcgcacaacgcgaaaacccctcatggggctgcaccgattttccccgggtattggaacaatacccaaaaaatctccaatatggggctgcaccggtttcgacgggggtgtggaggctggataagcgggcggcggcgcctgaccgccataaaacgggcaacttaaaaattaactgacaacaatcgtattgctgtcgctgcctaactaaaggcagccgtctgaaccggagaggccgcaggccggggaaggcgtcgtttatgcggcggacgtgcggcgggtaagagttgccccgcccatgcattatgactctactgaaccgcgcagtctgtcaggtgtctgcgcggagagggaatgctgaaacctgactgcgcccggagaaagtcttgtcaaagcgctttcggacaggggttcgactcccctcagctccaccacaagtcaaaaaatccgaacattatcatcaatggtgatacgttcggatttttgatttttatgagttgttttataatttagaaattactgtggtttgtagcatattctcggcctcctccaagccttgcatcacttccgccatgatgcgagtggccaagataaatcctgaactgaacgcttcaccctcagtaatgcaggacagttcacttgtgcagtccttgaatttttcaaaggtttctttttgtttcattgtcagacttgagttcaggtctccctcgtttttgcatatcaacttaacttaacgagtttgccaccctcgtttctcaaagaaacagttgatattatcaatcaaacgatttataatgtcaactgtgataatagttgtatggaggcttattatgactacttctgaacagatacgagttctttgtgtgcgttctggcgtaagtttgtcagaattggcaagaagaataaatcaaacaccacaaaatttcagtgttaaacttaagagaaatacggttacacaagatgagctaaatcaaattgctaatgtgctcaatgtgaaatatgaacagtattttgttttagctaatggagatcaggttcgataaataaagagaaggtgaaaaaatggatacaaacattatttataatatagattgcgtcgccggaatgaatcaaatgatagatgaggcgtctatagaccttatcatcgcggatccaccatattttaaggttatcggcgaaaaatgggattatctttggagaacagaagaagactatcttgaatggtcagaaaaatggattgcagaagctgcccgtgttttaagaatgggcggcagtttctatttgtttggttattttagaatgttaagtagattgttgcctattttagaaaagtatggttttgaacttagacaacaaatagtattaaataaaggcatgcaagctgtatctgggcgagcaactaaaaattatcgaatgttccctaatgtgaccgaaagtattttatttttatgtaaagatcccaaaccttttgcaaaatcctttttaaagcaaaggcaaaaagaattaggttattccgcaaaacaaatcaatgagatgttgggtgtcaaatcaaacggtggcggtatgtggagtatttatacaggcaaaaatgtttgcgagcaattacccactgaagaattgtgggacaaattgcaaacaattcttgaatttaacattccatacgataagattagtcaaacatatcatgcacaaatggggttaacagatgtatgggatgatgtgaatttttatgaagaaaaagaccgcatccatcctacccaaaaaccacaaaaactgcttgcaagactaattcttgcaagcagtgatgaggacgatattgttttagatccatttatgggtggaggttcaacagccttggcttgtattaagaacaagcgtaattatattggatttgaaatagaacaagagtattacgaaaagtcgttagaacgattagcatgtagacagatgacgctattataattatcttaaatcgataaactgtgagcgtaacgatagtggtatatctgcttttttcaaaacgattttaggcaaatatatttcatccgcgaatttgttgcatagatcggcattggttatattattagtttttcttatgtcttctaataattgcaatagcttttctttatttaatccattaacacgagcagatgggctgtattttttaataacatttttaatgttagctacacttatggtagttgatccagaatatgaacttaaaggaagtagtacatctgaataagtattgtttttggatgggaatacatcggtgattatattgccatcatttgtgatttttgatctgtaaatcaaagttggttctgttaatgcgaattttagcatatgaggccacatgttaaacggtgctttagatgttgactgtgaacgaatattgagataatagtcaatcatacagtacgcaaaccctttactctttgggtcaacttcccatattgatgcaataatgtcgttgttgttgctatcatatatggattcgaattcaaaaagaacaaagtaatatctgtaaggatccaataactttgcaaactcgtcattgtttcggattgctattaaccacttcgaatcatctttcctattaatgcttgtagagccgcatacagcacattccgtttctaagcttgaaacaactgcaccacaagcattacaagaccctaattgatcgactctataacaagttttaatttcaccatgtctttcatcatctataactaaatcataaccacgagcaccagattttccgccaggatatcctgttacgacactcaccaaatgctgaccaacatatcccatacgtgcctgaggcgtttgttgagttatttttgaccatgcattaacttttgctcttaaatcaatatataaatctttgatcaaggcttcagaagcttctatcgttcctaaagtataatttagcataaaaccactccttcaaatatatttccattttgttctaacacatttcgacgttttttacaatagtttattggaggtgatgcaatgtactttaaatacctgtcggctgcgtttggcagcgccatgatcacatcggtctattcggccagtaccacgggccgcagggaacggcggcattggcggtcgtcgctccggtctggaacatcatctacagtcttggccttttgatgggcatcggcggcagcgtgattttcagtacaaagcgcggcagcgagaaatgcgacgggagtgagaaccagtatttcacatcggccgtgatcggcgcagtgatcttatccattctggcatggatcggggccatatgcttcgagcgccccatcctgaccttcttcggagcggatggctcctaccattgtccgcacctatgcgttatccttcctgctgctgccgttcaacatcttctcgacctattatttccaggcgatcatgaagccgaaggcagcgttcgttgtttctgtggcacggggacttgtcatcagcggcattttgatcatggttcttcctgcgctggtcaacgccgatgcgatctggtttgcaatgccagtcacggagctgctggtcatgctttacggcgcttcgatgatccgcaaatacacaagggctttgccgggaggtaccacttatgcagatacccgccattgaaagcaatgcaccctcgctgatctgaagctgctcacttaataggccgccctgcacgcagcgcctcccttgcggtatgggtacgtgttcgaatctatttgtgccatgataagataacagcaaaaacaaaaccaccctaacgggtggttttgcttttgctggggctacttcattcggccgtcgccggccatgagggcggtcatctcctcgatgcgctccagtgggaacggcggctcacacaggggcctcatggcgatggacatgagcttcatgggatcgtcgtccgccgccacacggttggagctgagcgttccgcagcgcttgcagcggtgtatgatcgcccactcgccgcccctgcgtacccagaccgccaccggctccataataccgctgcagtcagaggcccggtcgccaggctcgatgtctacatgcaggctggaaaggcagttggggcagtggttacggtggtcgctgccggcattctgcggtgtgcagagtcggccgcagactttgcaggtgaaggtgtcattgcagggatgggtcttgtagtagcctttttcaaaggtcttccgcttgttttcgcggttcatggtgtttcctcctgaagatgtgttttcatgctccgggaggaatggcgtgcatatcgccatcgattgacaagggcaggcgtgtttgctcttgtcaatcgatggctgccagacctcccggtcaggccacacgctccagtgtcagggtattgagtttcaaacgtgtctccttaataaaatgtgtattgcgccctgcgggcactgacgacagggtactctccgcgccgccgtttgtcaagatcctacgcgtgcctgaacacctttttctccaacgcaaagatgcgcggactgaaggtgtccggctccatcgtatcatacgtctcgcggtagatctccatacggctgtccaccgcgtcgatcaggctcagcagctccgcctcggcgcacagagggcgcaccgccgcgccgaactccggttcaccgtggtgagagaggatcaggtgctgcagcagcacggatttctcctccggcacgcccaggcgggaggcagtctccgccgcgtcctgcgctcccatgaccaggtgccccagcagctgccccttaatggagtaatccgtggccagacccagctgcgaaaacacgaactcctgcgccttcgccatatcgtggagcagcgtgcccgtcagcagcaggctgcggtcgatcgtctccgggtacattcccgccaggaagtccgcgatcttcaccatgttggcggtgtgcatcagcaggccacccagaaaagcatggtgtacgctcttggcggcggggatggacgcaagcgtctccccgtgagcctccagcatggcctcggccacggcacggtagtccgggtccgtaatggaggccgccgcacggcgcagatcctccatcgccgcaccgcagtcgatgggggctgtgggcaccaggtcggacacatccaccggatcctcctgggccgcctgacggatacgcgcggcggtgaactgcgcggtgccccgatactcacccacggtaccccgcaccttgaccacggtgccctcgttggcggcggtcagcggcccgggatagtcccagaccttcagctccatcgtgccggtacggtcgctgagcgctccggtcaggaatggcttgccgttggccgccaccttgggggtggcggttttcaagatgtaaaagccctcgacctcgtcgccgggggtcatggcttggatggttttgttgtactccatggcgattctcctcccctgtttttgcgttgtggatatgataccacatttgccaaaggggggcaaggggacgggcggttttcggcggaaatccgaaaacgcttccggcaaacaaaaaatttgtttgccccaaggtatttggcttttggttcccggcgggaaacgccggaaaaagcacccatcgttaaaggtttttacaagtttcattttttgacacgtcttaacacggttcgacaatttatttatgacaaatttatgtattgcgcggaaagattaacgtgcattttattaaaccgatgttataatctgtacatggtttcaagaggcgatccggacacctcgaaaaacaatttcactgcacaaaggagagtgtgtttctgtgctgacattcattatcggtctggtcatcctgatcggcggcgcagccctctacggtcgtttctgcgaaaaggtctttggacccgacgaccgcaagacgcccgcctacaccaaggaggacggcgttgacttcgttcccatgcgcggctggaaaaatagcctcatcaacctgctgaacatcgcaggcaccggtcctatcctcgggccgatccagggcatcctgtttgggcccatcgcgtttttgaccatccccatcggcaacgtcatcggcggcgccatgcacgactatttctccggcatgatctgcctgcgcgacggcggcacccagatgcctgagatgatccgccggtactccaccaagggtatctataagttctacaacgtgttcgtgtgcgtgctgctgctgctggtgggcgctgtgttcatctacacccccggcgacatcgccgccacgcagctctttggctttgacggcaaggctacctccgtctccacgtgggtcatctacggtgtcatcttcctgtattatctgatcgccaccgtgttccccatcgacgccatcatcggcaagatctaccccatcttcggcggtatcctgctgttctccgccatcggcatcttcatcggcatcttcgtcaccggtatgcccctgatgaacatctgggacagctgggctgctcccgtgctgagcctcaccggtgctgacggcaccgtgggtacgttcacctacgcggactacttctccaccaagcacttcctgcccatcttcttcgtgaccgtggcctgcggtattctgtccggcttccactccacccagaccgctatcatctcccgtaccatgaagagcgagcgtcagggccgcaacaccttctacaacatgatggtgctggagggcttcatcgccatggtctgggctgccggtgctatgggcgtgtacaacctggcgctgcaggagcccaatgctggactggctaccggcaccgtgggcgtggtgtgcaagtacctgctgggtcatgtgggcggcatcatcgccctgctgggcgtcatcgtgctgcccatcacctccggtgatacggcactgcgcgccctgcgcctgagcctgtctgagacgctgcacatcgaccagtccaccaacggcaagcgcatcaagctggctgtgcccatcttcgcgctggtcatcgccatcctcgtgttcgccaagaccaatgccgacggcttcaacattctgtggcgttacttcgcatgggccaaccagacgctgtccctgtttgccttcctgtgcatcaccgcgtggatgttcgagaacggcaagggcaagtgggcttggatccccatgatccccggctgcttctacaccttcatctgcgtgacctacatcgccaacgcccacatcggcttcaacatcccctggacgcccgcctacatcatcggtgtggtgtgcgccatcgcctatgtggtgggctgctgcgtgtacggcaagaagcgcgctgccagactgctggctaagtaagttctctcctctcctcaaatcggtatagcaaataacgtacaaaacatgagggacggcctacgccgtcccttgtgtttttttctcccggctggtataatccccttatcaaaacgaagggagtgcgctccatgaaacgctgtcttgtcctctccgactcattcaaaggcacgctgtcctccccgggcatctgccgcatcgcccgcagtctccatatccccggctggcacatcgacgccctgccggtggccgatggcggcgagggcaccacagactgctttctggatgcctgcggcggacagcgtatcgcccttcccgtgtccggtccctttggcggcactatcgatggcttctacggcctgctgccagaggggacagcggtggtggagtgcgccgcagcagcgggcctgcaccaggccgagggctgtcccgacccggagacggccaccacctacggtgtgggacagcttctggcccacgcgctggatcacggcgcaaagcgcctgatcctgggtctgggcggcagctgcaccaacgacggcggctgcggtgcggctgcagcgcttggcgtgcggtttctcgacggtgcggggcgcgccttcgttcccaccggcggcacgctggcggacatcgaggctatcgacctgtccgggcggcatcccggcctgcggcccggtgtgctgacggtcatgtgcgacatcgacaaccccctgtacggcgaaaccggcgcggcgtacatcttcgctccgcagaagggggcgaacgatgcctgcgtgcagcgactggacgcgggacttcggcatctcgccgcggtgctgcatgcacagctgggtgcggaggtggataccctccccggcggcggtgccgccggcggcttcggcgcgggctgcgctgcgctgttgtgcggcgccctgcgctccggtatcacgacggtgctggacaccgtggacttcgaccgccgtgcagtgggctgcgacctggtggtcaccggcgagggttcctttgatgcccaaagcctgggcggcaaggccatcagcggcgtggcaggccggtgtcagaagctgcgtgtccccgccgccgtgctggccgggcgtgtggcactgacaccggaacaatgggcaccgctggatctgcgggccgtccgcagtatcaaccccgccggggcgacccttgaggacgcccgggccaacgccgccgcctattaccggacggcactggaaacgctgctgaaggagtggaagtgatatggcacaggtcattgagatacacgacttttccgacccggcgctggacgtctacgcccgggccacggaaaaccagctggtcaaccgggccgacccggccaacgccctgttcatcgccgagagcccgctggtcatcggccgtgcactggacgccgggtgcgtaccggtgtcgttcctgatggagccgcagcacatcaccggcaaaggcgccgagatactgggtcgctgtgacccggacctccccgtctataccgcctccctggaggtgctgacgcagctcaccggcttccacctgacccgcgggatgctgtgcgccatgcgtcgtccgcccctgccctctgtggcggaggtctgcgccagggcgcggcgcatcgccgtactggaaaacgtgatgaaccccaccaacgtgggtgccattttccgctgcgcggccgccctgggcatggacgccgtcctgctgaccacagagggcagcgaccccctgtaccgccgggcttcccgggtaagcatgggtaatgtattcctggtgccatggacctatctgccggagggcgactggacggcggcactgcacgatctgggcttcaccaccgcggccatggccctgcgggaggactccctgcggttggatgacccacgcctgttgtcagcggagaggctggcggtggtgctgggcaccgagggcgacgggctggccgacggcaccatcgcccactgcgaccacacggtgatgatccccatgacccacggggtggacagcctgaatgtagctgccgcggctgccgtagccttctaccagttgggcctgcaatgccaataagcgaataaatatccccccggctccgccggggggatacactgtatttacaggaacttgtccagctcccgttccacattgtccattttcttcacttggggatgttccacacgatagccggacttaatgaccatatccagcgtccgcagggcggtcagatcggccagcgggtccgccgcgcagacgatcatatccgcgcacttgcccggctggatggagccggtctcgccggcaatacccgccagcgccgcattgcccagcgtggcgctgtgcagcgcaaacgccggcgtcacgccgcagtacttcacaaagtagcatagctcccgccacatatcgtagtgggtgatataggggcagccggtgtcggtgcccagacccacggggacaccatccgccagacaggccttcgccatggcgataacaccctcaaacaccaccttgccgttctcctgctgctcataggtggcgtgagagatactgcggtcgaacagcgcatagggcacggcaggcgagatggtggacacctggaaagcgccgcgttccttacacagctgcatgatgtgcccatccggcttcgcgccgtgctcgatggagtccacgccgttttccagcgccacccggacgccctccgggctctccacatgagcggccacctgcattcccagcgcatgggccttatcgcaggccgccttgaccagtgccggctgcatccgcagcacgcccggctcgcccaccacttcggcgtccataacgccgccggtgatcatcagcttgatcaggtcgggcttttccgccgcgatcttctccacgaaggccgcggcctcctccggcgtgcgggcctcataggccagcgacccggccatgtgcccgccgggtaccgacaccgccatattggacgccaccacccggggagacaggatctcgccccgcctggccgcatcgcgaatgatcgtgtcgaagtccgccacgccgcctacggtacggatagtggtcacgccggacagcagctccgtcctggcgtaaccctcgcacatcttcacgccgatgcggcgcatcaggccgttggaggtgatgagcttcaccagcttcttagggtcggagggctttttccggggcttgccggaggcgggcagatgcacatgcagattgatcagccccggcagcaggtatttgccgcccaggtccacgcgcgcatagccctccggcacatcggccgcgtcgcagacggcggcgatgcggtccccgtccacacagacagccagcctcgtccgaggcgtcatgtcccgcgtaccgtccagcatcacgccgttcaccagcgcatatttctcatggtttgtgtacatatgcatccctcctgttgggaaattttttcgcatgataccacaacgcggtggaaattgcaacagacaatttccaccgccagccaaagcagatccatgcacgtttgacgctctcagaatacgaccaccagcagcattttgaattgctcctgtccatacaccgcgtgcggatgccgcgccggcatgaggatggactcgccggtgtgcagcacatggggtacgccgtccacggtcacgcggcccacgccgtccaggcacgtcaccagcgcgtcgccgccggactcgtgggtgctgatctcctcgtccttgtcgaaggcaaacagcgtcacactgacggcgtcgttctgggccagcgtcttgctgaccacctgccccggctgataggccacctgatcccgcagggtcagcacggtggccatatcgaggttcttcatcatagcgatacactcctttttattggataaacgggggcggcaaagccgcccccgttatcgaaaacttacttgcccagggcggccttcagagcctccacacggtcggtcttttcccaggaaacacccaggtcctcacggcccatgtggccataggccgccagctggcggtaaatgggcttccgcaggtccagatcgcggatgatggcggtggggcgcaggtcaaagaccttctccaccgcggcctccagttcgctgtcggccaccacgccggtgccgaacgtctccaccagcacgctgacgggtcttgccacaccgatggcgtaagccagctgcacctggcacttgtccgccaagccggcggccaccacattcttggccacccagcgggcggcgtaggccgcgctgcggtccaccttggtggggtccttgcccgagaaggcgccgccgccatggggcgcgctgccgccgtaggtgtccacgatgatcttgcgcccggtcaggccggtatcggcggcggggccgccgctgacaaagcggccggtggggttcacatagatcttcgtctcgccgtccagcagctcggcaggaacagtgggcttgatgaccagctcgatcatatccttgcggatctgctccagcgtcacgtcagggctgtgctgggtggacagcaccacggtgtccacgcggacgggcttgccgttctcgtcgtactccacggtgatctgggtcttgccatcgggacgcagatagtccaccagaccctgcttgcgcacgtcggtcaagcgcttggccatcttgtgggcgatggagatcgccaggggcatcagctccggcgtctcgttgcaggcgtagccgaacatcatgccctggtcgccggcgccgttgtccagctcgctcttgccggaggccttggcctcatagctcttgtccacgcccaaagcgatatcgccggactgctcgtcgatattggtgatgacggcgcaggtgttgccgtcgaagccgcactcggaggagttgtagccgatgtccagcaccacctggcgggcgatcttggggatatccacatagcagctggtggtgatctcacccatgatgtggatcaggccggtggaggcgcaggtctcgcaggccacgcggccattggggtccttctcgaagatcgcgtccagcaccgcgtcgctgatctggtcgcagaccttgtcgggatgcccttcggtaacggactcagaggtaaacagatgtcttgccatgattttttctcctttcatctcgcggatggtcattgaaaaaagcgctctgccgaaccgacagagcgctgtgcttctttgctcatcctcatctttcgattcgttcgccggatttggcaccttgaaaaaacaggttgccgtggcttcatcgggccggtccctccgccactcttgataaggtatttacttgtacagcatattgtaacagtttttttagcattgtcaatagcatttccatgatttttgcaaataattcaactgtacggaaactttgccattgttcaaaaaaatgacatgacttttccgccgttatgggttatactgaacacaatttgtacacaggaggacactccccttgaaaaaactctatgacggggtgcagcgcttctgcgccgcccatccccggttcggcattcccaacctcatgcgcgttatcgtcatcggcaacgtggcggtctatgtgctcatgctgctgacccaggccaacgacgccaacgccctgagctttctgaccttcaatctcaatgccctgctccacggtgaggtgtggcggctggtgacctttgtgttcgtgcccgcctactccagtccctttgccctgctgatcagtctctacttctattactggatcggctccacgctggagcgccagtggggcacggccaagttcaacctgtactacatcagcggcacgctgctgacggtgctgggcgtggtgctggccagtctcatcaccggcaacccctacctgaccgcagcgggcaccggctatgtgaacctgtccatgttcttcgccttcgccttcctgttcccggacaccacggtgctgctgttcttcatcctccccgtgaagatgaagtggctggcgtatctggacggcgcactgttcgctttcgacatcatcaaggccatcggcgcccacaactgggccggtgtagtgctgcccatcgtggccctgctgaacttcgccgtgttcatctggccggaggtccactacctgaaggagcgcgccaaataccagaactcccgcaagaccgtccagttccgtcaggcccaacagcagcaggccaagcaggcccagcagcagggctatcgccacaagtgcgccgtctgcggccgcacggataccgactaccctgatctgcaattccgttactgcagcaagtgcgtcgggtaccactgcttctgtcaggaccacatcttcaaccacgtgcatttcacggaggaataacaaaatacagacgggccgcccgccgggcggctcttttttttgcacatatcttaataaaatcttaccgtcctgtaagttgacagtgaaaacgttttcgcgtacaataagcctgtagcaaaagaggaaaactgcccaaaaatccgaaacgcaaccgccggttgacacatttccagccccggtttatagaccgcaaccggcaaaacccgtatgatagcgccatcaaaaccaaacggcggcacccgccgtcatacggaaggagcgcatacctatgattttagctgacaagatcgtgtccctgcggaaaaaggcaggctggagccaggaggacctggccgagaagctgggcgtcacccgccagtccgtatccaaatgggagggcgcacagtccgtgcccgatatggataaggtcgtgatgatgagccgcctgttcggtgtctccaccgacttcctgctgaaggacgaactggaggaggaaaccccctgtgccgcggcccaggacgacgacacgcccctgcgccgcgtgagcctgacccaggcctccgcctatctggccctgcgtaaggccgccgcgccgaagatcgccatagccaccgccctgtgcatcatctccccggtcacgctgatcctgctggccggcatgagcgaggtgcagcgtttccacatctccgaaaatgccgccagcggcatcggtctgtgcgtgctgctgggtctggtggcgctggccgtgagcatctttctgcgggcaggtgcagaagccagggagttccgcttcctggaggaagaaccctttgaaacggagtacggcgtggagggcatggtgcgccagcggcagcgggaatacaaggacacccacacccggctcgtcaccgtgggcgtggtgctgtgtgtactggcctccgtaccgctgttcgccgccatgtgcataaacggcagcgacctgctctatatcgccgctgtctgcgcgctgctggtgctggtggccatcggctgtctggcactggtcaccgccggcgtatatcagggcgccatggagcagctgctggaggagggcgactacacccgtccccagaaaaagcaccacaagctgatgggcaccgtcaccatgatctactggctcaccgccacggcggtgttcctgctgtacacctacggtccccacggcaacggccaaccccggtacagctggatcatctgggctgtggccggcgtgctgtacgccgccgttatgggcatcgtccgcatcatcagccgcggctgcggctgatgatgccccacaatagaagcttaggagagaaataggaggaactgaccccatgctggacattcaacatctgaccaagacctacggcgagaagaaggccgtggatgatctgacgctgcacatcgcccccggcgagatctacggcttcatcggccataacggcgccggcaagaccaccacgctgaaatccgtggtgggtatcctgcaatttgaccagggcgagatcaccatcgacggccgatccatcaaggccgatcccctgggctgcaagcgggagatggcctacatccccgataacccggatctgtacgactacatgaccggcatcaaatatctgaacttcatcgccgatgtattcggcgtggacgcccagacccggcaggctcgtatccgcacctacgcggatgcctttgagctgacgggcgacctggcccaacccattgccgcctattcccacggcatgaagcagaagctgtccatcattgccgcgtggctccacgacccgaaggtcatcatcatggatgagcccttcgtaggcctggaccccaaggctgcccacctgctcaagggtatgatgcgtaagatctgcgacaacggcggcgccatcttcttctccacccatgtgctggaggtagcggaaaagctctgcgacaaggtggctatcatcaagggcggccggctcatccgttccggcaccatggaggaggtcaagggcgacgactccctggaggaggtcttcctggagctggaggcggagtgatggtcaaattattgctgaaaaaacagctgtccgagatcttccgcagctacttctacgacgcgaaaaagaacaaaccccggtccaaggcaagcaccgtcagtttgatcgtgctgtatgtgctgctgatggtgggtgttatcggcggtatgttcacgctgttctccataggtctgtgcgctcccctgcacgaggccggtctggattggctgtacttcaccctctttgccctggtcggtgtgctgatgggcgtatttggcagcgtgttcaacacgttctccggcctgtaccaggccaaggacaacgacctgctgctgtcgctgcctatccccgtgcgtgccattctggcctcccggctgctgggtgtatacctgatgggtctgatgttctccggcgtgatcctgctgccctgcgtcatcgtctactgggccgtcggtgtgctgaccgccgccactgtgcttggcggcatcgcgctgattctggccgtctccctgctggtgctggtgctctcctgtctgctgggctgggtggtagccaagatccacagcaagctcaagcgcaagaacctccttaccaccctgatcgcgctggcgttctttgccctgtactacatggtgtgcttccgcgccaacgaactgatcgagcagctcatgctgcacctgaatgaggtgggtgcagccatccgcggcagcgcctatcccctatatctcatgggccgtatgggcgccggcgactatctggctgtcgtgctggtgctggccgtaatggcggcgctgtgcgcgctcacatacctgctgctcagccgcacattcctgtccattgccaccgccaacaacggcggcgccaaggccgtttataaggagacgaccgtcaaggccgccggtgtgcccgccgccttgctgcgtaaggagctgggccgcttcaccgccagtcccaactatatgctcaactgcggtctgggcacggtcatgctgcctattctgggcgtgctgctgctggtaaagagcagcgacctgctgcctgctatatacgaaatcgccggcgacgaggcctccggtcttctggcggcgatgctgtgcgccgccctgtgcctggtaggctccatgaacgacatggcctcctcctccatctccctggaggggaagaacctgtggctggcacagtccctgccggtgacaccgtggcaggtactgcgtgcaaagctgctggtacaggtgctggtgacgggtatccccatggcagtcacctctgtactgatactattggccgtccgccccgccctgccgctggccctcctgctgatagcgctgcctcaggcctttgtgtggctgtcggcagccttcggcctgaccatggacctgaagcgccccaacctggtctggaccaatgagatcaccgtcatcaagcagcgtctgacggtgctgcttgccatgctgggcggctgggtgtacgccgcccttgtcggcgtgctgtactacctgttcggtatcgacatgggtgcagcgtggtatctgctggcctggacagtgctgaccgtcgtgctgacgctggtgctgctgcgctggctccaccgcaccggcagccgcctgttcgccgccctgtaattgtgtcagaaacgtaaattctgccccgttccggcctccggaacggggttttcccgcagtttttgtggatttgcttatagacacttcgggcaaaatgtggtagggtaattcatcaaagaaaaaaagctatgcagaacaaggaggccttaccatgaacgaggtcaaatcccccaagaaacctctgatctactactacatgatcgtggtactgctggtgctgctgtttaacctgctggccatgccctggctggcggagcaccagatcaaggaggtggactacaacaccttcgtctccatgaccgagaagaatgagatcggccaggtggagatccagcagcagagcaaccgcatcctctttacctccaccgacggcaaaaccatctacaagaccgccatcgtccccgacgacgacctggtccagcgcctgctggacaccggaatctccaccaccggcgaggagatcgagcagacttccctgctgacggatatcctgggctgggtcctgccgctggtgatctttatcgccatcggtcagatcatctcccgcagtctgatgaagaaaatgggcggcagcgactccctgatgttcaatatgggcaagtccgacgccaaggtctacgtcaagtccgccgagggcatcaagtttgccgatgtggccggtgaggacgaggccaaggagaacttgcaggaggtggtgaactacctccatgaccccaccaagtatcaggagatcggcgcttccatgcccaagggcgtgctgctggtgggccctccgggcaccggcaagaccatgctggccaaggctgtggccggcgaggccaacgtgccgttcttctccatgtccggctcggagttcgtggagatgttcgtgggcatgggcgcgtccaaggtgcgcgacctgtttaagcaggccaaggagaaagccccctgcatcgtgttcatcgacgagatcgacgccatcggccagaagcgcagcggcggccagtacggcggcaacgacgagcgggagcagacgctgaaccagctgctcaccgagatggacggcttcgagggcaacaccggcgtcatcattctggccgccaccaaccgtcccgaatcccttgatccggccctgacccgacccggtcgtttcgaccgccgtgtacccgtggagctgcccgacctgctggggcgcgaggccattctgaaggtacacgccaaaaagatcaagatcgccgaggacgtggacttcaacaagatcgcccgtatggcctccggtgcctccggcgccgagctggccaacatcgtcaacgaggccgccctccgcgccgtccgtgacggacgccgctttgccacccaggccgacctggaggagagcatcgaggtagtcattgccggctaccagaagaagaacgccattatgaccgatcacgagaagcatatcgtggcctaccacgagatcgggcacgcgctggtggcggccaagcagaccaattccgccccggtgcagaagatcaccatcgtgccccgcacctccggtgctctgggctataccatgcaggtggaggagggcaaccactacctgatgtctcaggaggaaatggagaacaagatcgccaccctcaccggcggccgcgccgccgaggagacggtgttcggcaccatcaccaccggtgccagcaacgacatcgagcaggccaccaagctggcccgcgccatgatcacccgctacggcatgagcagggacttcgacatggtggccatggagacggtgcagaaccaatatctgggcggcgacacgtctctggcctgctccgccgagacccaggcgaagatcgaccagcaggtggtggcactggtgaagcatcagcacgagaaggcgctgaagctcctcaccgacaaccgcgccaagctggacgagctggccgccttcctgtacgagaaggagaccatcaccggcgaggagttcatggagatcctgaacaaaaaataagcgaaacgcccccggcgtcgccgggggcgtccatcggaggaataccgcatgaagttcatcacgatactggccgtcaccttcttcgccggtatgggcgcaggactgggcaccggttttgcgggcatgagcgccgcggcggtcgtcagtcccatgctcatcacatttctgggcatggacccctacatggcggtaggcatcgccctggcctccgacgtgctggccagcgccgtctccgcctacacctaccgcaaaaacaagaacctggacatccggaacggcatcattatgatggtcaccgtgcttctgttcaccgtggcaggcagctacatcgccagcctggtgccctcccgcaccatgggaagcttctccgtgatcatgacgttcctgctgggcgtcaagttcatcgtccgtcccgttatgaccaccaaggaggccatgctgggtgtttccgccaaaaagcgtgccgtccagtctgtggtctgcggcatcgtcattggcttcatctgtggcttcgtgggcgcgggcggcggcatgatgatgctgctgatcctgaccacggtgctgggctacgagctgaagacagccgtgggcaccagcgtgttcatcatgacctttaccgccctgaccggcgccatttcccatttcaccatcggcggcgcgccggactggaccgtgctggcgctgtgcgtggtgttcaccctgatctgggcccgcatcgccgcagtatttgccaacaaggccgaacccaaaacgctgaaccgcgccaccggcgtggtgctggtgatcctcggcgccgccatcatgaccttcaacctgctgaagtgaccgctgaaatacgacaagaacgcctccggcagtgccggaggcgttctttccttcacttattctgctcatacagcacggccagaccccgcaggatcaggtccgcggccatatgcatctcgtgccggcacgccggcgcgatcaccggcgcgatgccgccggtagccaccaccgtggcctttcggccaagctcggcctccatccggtcgatcagtccgtccagcagcagtgccgagcccagcacgcacccgctttgcatacacgtcagcgtgtcgtcaccgatggctctatccggcaccgccagcgggatgtccggcagcagcgccgtgccgcccgccagggacgacagcgccaggtttgcccccggcaggatggctccgccccggaacgctccctgctcatccagcaccgtcaccgtggtggcagtgcccatgtcgaccagcagcagcggcggctgatacagatccagcgcgcccacggcggcggtcagcaggtccgcgcccagcgtctccggccgcttgatccgcaccggtacgcggcagcggacatttccgcccaccaccaacggctcctttccggtcagcagccgcgccgcgccctgcagggcccgggtcaccggcggcaccaccgaggagatgatgacctgctccacctcccgcctgttcacctccgccaactccaacagctggctcagtgccacggcgtaatcgcccacggcgctgtcgcgccgggtggcgatgcggaagctgcggcgcacctcgcgcccctccatcagtcccacgaccacgtgggtgttgcccacgtccagtgcaagcagcatacgaacagcctcccgtcttatgcgttggtcttgcgtgcggccagcttgccgcggctgtacacgaccgccttggcgatggccgcgccggtgatcaggcacaccacgccctctaccaggccgttcacgcccacaaaggcgatgacgaacaggaatgcgttggcactgccgagggcggccacaaagccctgaatgtactctgtgttgtagaagcacaggcacagggtggtcataaacagcaccgtgttgcacagcgcaccgatcaggcccgccgcgccgaaggaccacaggttcgtcttgtccagcttgttcaggcccttgaaggccacgccgcacagccagcccgccagaatacgggtgggcacgcacaccaggaacgtgtagatggggttgatacccagcagcaccgcgccgaactggctcctgccgaagcattcccagaagctgatgcagccgaacacgccgcccagaatggcgccgctggccggccccatgacgatggcgcccacgatcaccggcaccatcagcagggtgatctccagccccggcatcttgatcatgcccagtcccgtgacctccagcagcagcatgatcgccaccagcacggaaatgcgcaccagatcctgcacggtgtattttccgtgcttcgtttcgttattcataatttttacctcctgctgccgcctccgtccagcagagtgcggcgctcgcacgtatgataccacattttcgcgtttttgcaatagctgatttcaaaaaaagtacccccggcttcgccgggggtactggtcgtatgccgcacgatcggtccggcgaagccggggtactggctgtgcgccgccgtataggccggtcagcgcttccttctccgcatccaggccatgccgcccacggacgccagcgccatacccacgtaggccccgatgcccgcgtcgaacgtggtggggctgtccaccccgccgatagtgaagttcatcgtcaccttgcccgcgtcggacagaatggtcaccgtgtgcctgccgtccttcagcgtccgcagatacaccgccttcagatagacctcgatgccgccgttgtcctcggcgacgtagttggccgcggcgatggtcctgccgtccacctgcacgcccttaaagccgctgaacgccgccgtgctgcggaacgtcagcccgtagatgccggaggtgtaatccgtggcgctcttggcggcattagccgtcttcaccgcggaaattccgggcgtggacgcgccgccgtagtagtagtacccgccgccggagctgctctgcgccgccgtgctgatcacaaacggcgagaagctactggtcttgaagcagatgccccactctgtgtaggtgccctcaagggtctccggtgccataccgtcgccgttcacatagtggtcgatccgcgccttgcgcccgctgttaatcagccgctgcgcctctgcgtcagtgatctccagatagctgtacggcagatagaccgtatattcaccgttccactcgctatgtccactcacacgcaggcggaagtaccacttctgaccgttgccgccctcctggggatagcgttcacaccagaattcaccgccgccctctgccacggcaaagggttcattgtacgtcttgtcatgctccggctcattttcgctgacttccgttttggtagtcatgacaaacgggccattcttgccataggctatggtgtaccccagaacggtattattcgcgtccacccattcgatgaccatgccgcgatagttctgagtaaaggcaaagtagatcgtcacaccgtcacgtaccagcctgttggtggccacaaaggggatagtcctcgccactgtgttttccggatagctgttcgtccggttcggatcgctgcgctcctggtcgaagcccagcttcaccatcttgaaccaatccgcgtcaaattccgccggatcgcctgtgctttcaaaggggtgcgtgtggaaacccgcgaccttgcccttaaatgcatcgtccggcaccagcacaaaccccttgtccaggtcagccaatgagggcaagcccttgctgccgtcaaacgtagcctggaatctgccggtgctcttgtcgtatgttacgtctaagccggaacccgccgtaatcttgcccatcgcttcgttggcaaactcctcgctgggtgccaccacgggaacgctggattggctaccggcgttcactatttggctgaatcgatcctgtgctgtagtggccatctcgccaatgtacagggtaaactgttcatcatattgcgcatcaccggatacccatgttaacgtgaacgttcttgttgtcgccgttcccggcccgttttggccattggactgcgggaagaactgctcgcaagtccaggtgtcgccgccattactgatctgcttgccgttcactgccgccagcttatagtccgacataggcgccgccaccgtcagtgtaccgatgttctcccactttttccctgcctcaaagatgcctgccagcgtgccctccttgggccgtaccaccagccgttctgcctcgcgtgccacgttccagatctcagcatttacacctgttactttcacacgctccttgtccttcacatttacagcgggcaccatgccggcctctgcctcataggtaaactggtccacaacgcggatacgcaccagcaccagatttttgaccgggcttccctcgttcatgttcttgttgctgttccacacggacagcaccatcatctcgccgtaattttcgatggcgttgacggtcataaagccgtcccgcgtattcaccgccgccagaccgaagctgaacttctccatctcgtcggtgtacttgttcagcgctattgtacccttggcccaggcgtcccaaacgccgctgttgccgttgccggccgccgcgccgtggtagatctcctttgtggggttgcggaacgtaaccgtatacttgataccttccggattggcaagaccggcttcgatccaatgctgcttattaccggcgtacatctccacagtcagcacgcctatactgtctatgacttggtaattatagttgtaatctttgccgcgttccaactgtctggggaacgtgatcgtaaagttccgccccagatccggtgcggtaaagccgccggtgctccgcagcatctccgccgcaccgttttctttgctcagtggatcggtcttgacgctgtcatcccccttggactcggcgatctgcaccattgactcaaaatttgccattctgcgggaaaacttccacagctgagctccccacggcgtttcctcacgcaaaaacagcatatccaatatgtcacgcgccgccggctgcaaattgtagtaagcattgatcgccgcacgcgccttcgcggtatccgtaaacatgccatcattgccaatatccgtgccattgatagaaatatcgccaacaggagccttgtcgttgccgcccggcgtataggtatacttcactacgcccgttgtgctgtcgttgaccccgcccaagaagtcgcgcgcttgcatccccgcaacgctcgctgcatccgggagcgattttacatcagtgatattccccgttgtgggcccctgaccgggattattgccgccaccctggctgccattcagctgtttgtcaaaccgctggatcaatcgccaaaagcggaactgttctgttccgttggggcctgttgccacacggatctccaactcgttcaatgacacttgcactgccggagcgaggttattatattccgtaatggcttcctttgcctttgcttcatccgtgattttatctgtttccttatcgtatatgctatcgctgtaggtaactgtgttgtactcacttccatttccgagtttccatgtacgataggtaaaatacttattaaaatactcgatggccgcattggcatcagccgtagtaatatactccgcgttattatacagataatctgttccatcgctggacttcagcagatgcgtcccctccaccttaccggtatccgggccattgctgccttcattgatctgcaccgccggccgctttagtgccgccgtgtacatacccatcaagtctccaaacgttcttgtaccgtttccatattttacctgatacgcatcaagtatagcggcgatgcttctatttgtatcgccaatttgcgcgttatagccgtccacagcgttctgaaccgtggctttctgctcttgcgttcggataaatttatcctggcgcaatccaacattatttataacgacaaaaacaccatttttattatctgcaactacaaaataggtgtttaaataattctttatcgccgttttttcggcttcggttcccgtaagcgcgtccactcccgccagcaccgtctccatcgtatacgtctcgttgccggtctggacgtcctcactctccccattcgtttccgcgatggcgctcgtacacagccccagcgccatcaccagcgccagcagcaaactgaccacttttttcatcatacgttcctctcctttcccgccaagagagttcgtttcagcccgctgaaacgttgaaagggagtatactcccttggcggcacataattactctttctttataccactttgccgtctttgaaacaatatgcagggagggaatggtatatttttcggcattaaatgcaaaacagccgggctttttgtgcaaaagtccggctgttttcggttattccgccatgggctgtacgccgcccgtgggcagtatgggccggctgatgggaacgctccccagcatcagctggtactcgccgtccagcatcagctgcacctgcgtcacatcctccagtgagcacagcgagtccaccagcccctgtatcatgcggttctgcgcctccgcgtcctccggcagcagcgccgccacgctccccggcaggttcaggtagcatatcccctcctccgtgctggcgttcagggccgtaaagccctccggcagcagcgggtacaggtccgcgtagctgtccagcggccgttccgtcagtgccttcaccaccgcctgggccaccgtctccccctcgtacaccgtcagccggcgctcctcgcccaccagcgtaccgccgccgtccgggaagtacagctgcaccttcaccgtccgcaccacatcgtccgggctggtcagcagcacctcctctgaggtgtacacctcgctggtccggtccgcaggcagctcgcccgccaccgtcagccgcacggcgtaaatgccgtccagctgcatcagcgacagcgtgatgcagtagtccgcgatggtccggtcaataccgatcagctggtcgtattcgctgctcatgtccaccgacaccgttccgccggtgacggtacagctcagcagctgcgtccctacgggtatgggcgcgatgaatccctccgccgtgcagccgcccagcagcagctccatgatgtactgcgcctgctgctggcgtccccggtccccggcggtgatatccgcccaggggatggcgatgccctgcacggcgtcgccgccgccggcggacttgttctgctcgctcaggtccgccgggcagtacagccgcaggctcccgccgtccgccgcctgctgctcgccgcaggcgcacaggctcgccgccagcgccgccgccagcagcagggaaatgatacgctttttcatgcctcctcccccctttccgccagcggcaggtacacggtgaacaccgtgcccacgccgtttgcgccgtggccggcggagatggtacctccccggttctcgatggtgtccttcacgatggacagccccagtcccgtgccgcccacctcccgcgagcgcatcttgtccacccggtagaaccggtcaaaaatatgcggcaggtcctcgttcggtataccgatgccgttgtcgctgaccgtcagcaccaccttgtccccatccacatgggcctccgcccggacgaagccgccctcggcggcagagtacttgatggcgttctccatcaggttgtacaggatctgatgtacatcgtcgtcggtggccagcgccacggcatcctcgtccgccgcgccggatacggtcacgcccttctcctgggccaccatggtcagcatacgctccacgcgctccagcaccggcctcaccgccacgggatagggctgctgcaccacgccgctgtccagccgcgtcagccgcagcaggttctcggtaatgcggctcagccgttccgcctcccgcccgatgtcggtgacgaactcctttgtggtctcctcgtccatgtgatccgtctgcaggatggagtccgtaagcagccgtatgcccgccaacggcgttttcagctcgtggctggcgtcggagacgaaccgccgccgggcgttctccgtggtctgcaatcggtcggtcaggctgttgaattccgccgcgatctgggcgatctcgtcggtgccgctggcgtcagcccggtggctgtacgcgccctcacgcaccttgcggatggcctgcaaaagcccgctgatctgccgggtcagcatctggctgagcacgatgctcagccccgccaccagcagggcgatcagcagcgagataatgagcaggttgtgccggaacgcctccagcagctccgactgctccgtgtcgtagtcataggcgtacaccgcgcccacgatctggttgtgatacaccacaggcgtggccacgcggctcaaaaacgccgtgccgtcgtagctgcaatagctggcgtcctgtccccgcagggccaccgccaccacggagtacagcgcgtattcgcccacggcgttgctgccctgccgggtgtcgtacagcaccagtcccgcgctgttggtcaccatgatacgggccgcgccggactcgtccaggccctccagcgccgcctgcacgttctccaccgtcagcttctccaagcccatcatcgccgactcgatgaccttcgcggtgctcttcaggttgttctgattggaggtcaccatcatgttctggctcaccagcagcggataggagttcagcaggatcagcaccgccgcgatgaccaggatatagctcaggctgaacttcagctgcaaggtcgccttgccccgcagcttgcgtataccaaggcccaggcgctgccgcgtagtctgcgcctgcggggtctggtccgtatttgctgccgccgtgtcacacggtgggctgttcttctcccttaaaatagtaaccaactccccacttcgtcataatgtataccgggttggcggggtccggctccagcttttcccgcagccgtcggatgtgcacgtccaccgtccgataatctccggcgtaggaatacccccacaccaggtccatcaggctctcccggctgtacacccgccgggggtttttcatcagcagctcgatcaggtcatactcctttgcggtcaggtcgatggtctttccgtcccgcagggccacccgctgctccgtatccaggctcaggtcgcccacggtcagcagcggcgtgcgctggcggctctgggccgcctggttcccgttcatggaccgccgcagcagtgcccggatgcgtgccttcagctccagaatgttaaagggcttcgtcacatagtcgtccgcgccgcaggcaaagcccatcagcttgtcgctgtcctcgctgcgggcggtcagcatgatgacgggcacatcggaaaactcccgtatcttcatgcaggcgtcgctgccggacaggccgggcatcatcacgtccatgacgatcaggtcgaagttctccttcttctccagctccacggcggccgcgccgtcataggcggtcatcacctcatacccctcgttctccagattgaacttcatgcccttcaccagcagcttctcgtcgtctaccaccaatatcttcattcctgcgtatcctccgttatgatgtgatcttgtatgctctccacgatggcctgtccgattccctccacccgcgtcaggtcctccgcgccggtatagggtccgttggcctcccgttcgtccacgatccgctgggccagcaccgggccgatccccggcaggccgtccagctcctccgcgctggcggtgttgatgttcaccttcagcagcgcgggcgcagcctcctccgacggcacggcgctgatgtcatagccgccccgcacctgccgcggcgtcagcagccacgtcagtgccatcgccaggacgaacagcaccgtcagtcccagcaggaacacgtccgtctttgtcaattttatccgctttcccacagttgactaccccgcctcttttgcttataataggtcatggacataccggccccatgctccggacggggccgtccccctatattatagcatacatggagaaaaagtcacatgaaaatccgtcgttttattgctgtttttttatccgccctgattttatgcggtgttctgaccgttcccgccgccgcgctggaggatccggccatccgtgccaaggccgcgctgctggtggaggccgagaccggcacgatactctatgacaaaaatatccacgatgagctgtccattgccagcaccaccaagatcatgtccgccctgctgatcttcgaggccatcgaccggggcgagctgcggctggaccagcaggtcaccgccaccgccaccgccctgcgcggcctgccggaggacggcagcaccgccgacatcgtggagggtgaaacgctgacggtggagcagctgctgtactgtatgctggtcatctccgccaacgagacgtgcaacatcctgggcgaaacgctgtgcggcagcgtagatgcctttgtggcgcgcatgaaccagcgcgcccaggagctggggtgcaaaaacacccacttcgccaacaccaccggcctgacccagtccggccactactcctccgcctacgatctgtatctcatcacccgcgaggccataaagcacgaggactttatgaccatggtgaacaccaagtcctatgagatacctcccaccaacaagaccgaggaggagcgcgtgctccacagcaccaacgccctgatctccaactggcggctggccgggtacctgtactccggcgcccagggcattaagaccggcagcaccgatgccgccggccagtgccttgtctcctccgctgtccgcggcagccgcacgctcatcagcgtggtgctgggcgcggagaaggtcgaaaaggagaacggctccggctacatcgtggagagctttaccgagacggcccgtctgttcgactggggctttgacaactttgccccccagcaggtgctggacgagaatgagctgatccaggaggtccccgtggccctgagcaagcaggtctccaccgtggccgtccacccggcggagagcgccgacgccatgctgcccaaggatctggacgtcagcgccctgacccgcaccgtcacgctggataacgagacggcgctggcccccatcgccgccggcgaccgcctgggcgagatcaccgtcagctacggcgacaccacctacgtcaccgtacccctgctggccgtggccgacgtgtccgccagccgcttcctgtccctgcgccacgccatcggcgaattcttctcccagcgctccgcccgcatcgccgttctggcgctggtggtgctggtcgccgccctggttctgtggttccggttctacggccgcaaccgccgctacggcaagcccggcagcaagcagtaccgccaccactcctaccgcggccgccgtcactgatatggcgcctatccgtatactctacgaggacccgtatctggtcctctgcgtcaagcccgtgggcgtcctgtcggaggacagcccctccggtgcctgtatgccctgcctgctgcgcgagcactaccgcgccctggggcagaacgactatatcgccaccgtccaccggctggaccggctggtgggcggcgttatgctgttctcccgccgccgggacgtcaccggaaagctcaccgccgccgtggcagagcaccgcgtcaccaaggaatacctggccgttctccggggcacgccggcacaggacgaagccaccctcactgacctgctgttccgcgacgccgcccacaacaaaagctacgtggtcaaacgtatgcggaagggcgtccgccaggcgtccctcagctacaccgtccagggcgaagcggacggcctgacgctggtgcgcgtgcatctgcacaccggccgcacccaccagatccgggtgcagttctcctcccgcggtctccccctgatgggggatatccgctatggcagcaaggccgactgctcccccgccctgtggtccacgcggctggcgctgacacaccccgtcaccggcaagcccatcgacgtttcctgtcccccgccggacgcctggccctggaatttgtttgcatgaaaaaagaccgcctccggcggtctttttcatgcaaacgcacgggaaaataaaagcggtccgttgctcatacatgaagctctatgccagtaaatgcccgatccccacaaacagacaccccactccaaagaaaaacgtcaggatggctgtggcgtacagccagaaccgccccgcccccagcctgggatagtccaaaaacggataggggtacagttggccggtgcgtccgataggcttgccggtcccggcccgcagcatggcaaaggcaaaatacgccagcggcagcaccagccaccagacggcgtgccccaccgtcagccctgccttgtcctgccacagcagccactgcagcaccgtcagccccggcgtaataaagtgtacgcagacattcccgaaggaaaagcgccccttcagccagctctcatcgtcccgccggtgggcggtcggcagcagcacaaaggcgtagatcaggtgcgtcacatagatgcacagcgtcatactcagcgccacgcccggggaactgagccaccggaacgcgccgcagtgggggtcatgcccgctggcgcccagcgccagctcatagagcagtatcagcagattgctcaggtgtgtgtagtacacgaaaaaaccggcgcggatacagtgcttctccggcagccacgcctttttgtacagtccgatggcggtgaccagcacgatcaccagcgccgacagccgcagcacggtcatccctcccgcagcgccttcagcagtgcgatctcccgtgcgtagcccgccagttcattgggcgtctccagcacaaagggcagcccctgcaatgcgggatgccgcaccacccggcccagcgcctccgcgcccagacagccctcaccgatgcgggcgtggcgatccttgtgggcgccccgtgggttcagactgtcgttgatgtgcactgccttcagtctctccagaccgatgacccggtcgaactccgtcaacaccccgtccaagtcgtccgcgatgtcgtaccccgcgtcggacacatggcaggtgtccagacacacccccagcttatccgacagtgccacccggtcgatgatctcccgcagctcctcgaaccggctgcccacctcactgcccttgccggacatggtctccagcaggacggtggtgcggaggcccggcgtaaggatggcgttcagcgtctccgcgatctgggcaatacccgtctccataccctgcccggtgtggctgccgggatggaagttgtacacgttgccgggcaggtgctccatccgcttcaggtcgtccgcaagcgtcatgcgggcaaactcccgggtgtgctcatccttggagcagggattgatggtatacggcgcgtgggccaccagtgtgccgaattcgttttccgccgccagcgccagaaacgccgccacatccgccgggtcgatggccttggccttgctgccccgtggattgcgggtgaaaaactgaaacgtgttggccccgatggacagggccgtcctgcccatggccaaaaagccgtctgaggcggacagatgacacccgatatagaacatggccttcactcccttcacagccgcagggtggacacatcagccctgccgttttcgatggtcagcacgccgcaggtaggatgcagtggatcccctgccgcgccggggttcagcgtcagcagtgagccgtcgttgtccaccagcggcacatgggtatgtccgaacagcagcacctgtgcaccgtactccttcgccgcgtacatggcggccataggcgaacgcttcacgttccgcgtgtgcccgtgcagcgcaaagatccgcacgccgccgatctccagcagccattccggctggtcgcagctgccccaatcacagttgcccggcacaccctccatgggcagcgccgggaaccgcgcccgcagggccgtcaggtcccgctggcagtcccccaggtgcagcacccggtccggcgctgtcagctccaccgcgcgggccatattgtccacattcccgtgggaatcggaaagtaccagaattctcataattgcctcacaaatgtatcctatttgtgacgtattataccacgtccaccttgcaaactcaacgcttttgcggtatcataaaagcaacaaaagttcggaggtgctcaatatggtgggcggcgtgatggagctggatctccacggcatgaatacgtaccaggcgcagatcgccatcgacgcggcgctgcgccgctgcggcggcggtgtctaccgcctgcgcctcatccacggctaccggggcggcaccgccatccgggatatgctgtggacggtgtacaacaagcgcagtcaagtgaaacgacttgtcagtatcagtgagggcgtcaccgagctggtcctgcgcgagtattaaggagggacccccatgaagctggcacaaattcaaatgcacgtcaccgccgacaaagccgccaacctccgccacgcggaagacctgctgcgctccgtccgcggcgccgacatggccatcctgccggagatgttctgctgcccctacgacaacgcctgtttccgcgcctacggcgagcctgagggcggtccggcatatcagatgctctcccgcaccgcacgggagctaaggctctggctggtgggcggctccctccccgagctggacggtgacaagatctataacaccgcctacgttttcgaccccacaggcacctgcgtggcccgccaccggaaaatgcacctgttcgacatcgacgtgcagggcggccagtccttccgcgagtccgccaccctgtcgccggggagcgatatcaccctcttcgacacgccctatggcagaataggcctgtgcatctgctttgacctgcggttcgaggagctgtgccgcctcatggctctggagggtgcccgggtcttgctggccccggcagccttcaacatgaccaccggccccgcccactgggaactgctcctgcgtcagcgtgcggtagataaccagtgcttcaccgtgggtgccgcccccgcccgggacgaggccgcctcctatgtggcctggggccactccctgatctgcgacccctggggcacggtgctgcatgaatgcggcagcggcgaggaaaccgccgtcgtcgacctggatctctcccgggtggatgccgtccggcagcagctgcctatcctctccgcccgccggacggatatatacgatatccgccggaggtaggtctgctatcgatttctcagatagccagatggcgcaattttttaaaatactcattgacaaaagtttccttttacgataccatacgatttgtggatgcccgcgctgtcctcgcagcgcggacattttctgcgccgcaggcgctgtttggatagaaagaaaggataccagctatgaaaaacctcaacgaaaagcggcccagtgggctggcgctgctccccttcgcgatgttcatcgtcatctacatgggcgccggtatttactaccaggtaaagggtatggagatggccttttaccagttcccctccgtcaccgccatgttcctggcggtgctggcggcctttatcatgttcaagggcaccattaacgagaagttcgacacctttgccaagggtgccgccaacgtggacatcctcaccatgctgatgatctacattctggccggcgccttcgccaacgtggcggcggtcatgggcggccgcgaatccacggtaaatctgggcctgtccctggtgccggtggaattcctggccgccggtctgttcgtcatctccgcctttatgggcaccgccaccggctcctccatgggtaccgtcaccgccgtgatccccatcgccgtgggtattgcggaaaaaggcggcctgtccctcaccgtggtcatcggtgccgtggtgggcggcgccatgttcggcgacaacctctccatgatctccgacaccaccattgccgccacccgcagccagcgctgcgaaatgcgcgacaagttccgtgtcaacttcctcatcgctctgccggcggcactgatcaccctggtcctcctgctgatcttcggccgtccggagacggtcatgcccctggaggccctgcccttcgatctcatcaaggttctgccctacgtgctggtgctggtcctggccctgtgcgggctcaacgtgttcctggccctgaccgtgggcatcttctccgccggtctggtgggcatctgctgcggtgatctgaccattgccgccttcgcccagagcgtgtgggacggcttcaccggcatgaacgaggtattcttcctgacgctgctgtgcggcggtatgtcggaactcatcgccaaaaacggcggcatcgcctggatcatccagaagctgcggaaagtcatgaagggcaacaagtccgcccaggtcggcatcgccgccatggtctccctgtgcgactgcgccaccgccaacaacaccgtggccatcatcgtggccggcgacatggcccgtgacgtgtcccatgaatacaaggtggatccccgccgcaccgcctccctgctggacatcttctcctgcgtgttccagggcatcatcccctacggcgcgcagctgctgagcgccgccgccctggccaacgccaccgtgacctccgacgccctgcacaccagccccgccgccatcgtgggcggtatgtggtactgctggatcctggccgccgtgggcctgctgtccatcttcgttccttttgccgatggtgtctgccggaaagacccgtggaactgggaatacggctgcgcccaatccgccgtggccgccaaaaaggccctgctggaaaaggaagcggaggatgtctccgcccaataacgctccctgtctttgccgccgcggcacacccccccctggccgcggcggcacttttttgtcaaaatatacggtacctcccacccgcctggagaaattctcttctgcgatattcacaaattgtggttgcaatttttgtgcaaatagtgtagtataattcgcaagaaatccgcatggaacacaaggaaacggaggaaaatgcaatgaagaaatatacagacatgagccttcaggagcgtcaggccgaatacgccgccgtgcaggtggaatacgaaaagctcaaggccatgggtctcagcctgaatatggcccgtggcaagcccggcaaggcccagctggacctggtcacacccattttcagtctgctgaccaagccggaggactttgtctccgacggcatcgacgtccgcaactacggcgaggtggcgggtatccccgcggccagaaggctgtttgccgacattctgggctgcaagcccgagcaggtgttcgtgggcggcaacgccagcctccagctgatgtacgacgccgtatccaaggctttcacccacggtctgctccacagcgaaaagccctggtgcaagctggacaaggtcaaatggatctgccccgttcccggctatgaccgccacttcaaggtcaccgagagcttcggcgtagagatgatctccgtccccatgaccgccgacggccccgacatggaccaggtagaggccctcatcaaggaccccgccgtcaagggtatgtggaatgtccccaagtactccaaccccgagggcgtgatctactccgccgcgaccatcgaccgtctggcgaagatgaagcccgccgcccccgactttatgctcatgtgggacaacgcctactgcatccacgagttcgactgcgactatgtggaattccccgacatcatcagcctgtgcgcgaagtacggcaatgccgacatggtctacgagttcgcctccaccagcaaggtcaccttccccggtgccggcgtgggcgtcatggcatccagcgccgacaacatcgcctacttctccaagctcatcaacatccagaccatcggcttcgacaagatcaaccagctgcgccacgttctgttcctgaaggacaaggcccacaccctggccctgatgaagcagcacgccgccatcctggcccccaaattccacgcggtgctggacgctctggacaaggagatcgccccgctgggcatcgccggctacaagcgccccgtgggcggctactttgtcagcgtggacgtcatgcccggctgcgccaagcgcacccttgccctgtgcaaggaggccggcgtcaccatgaccggtgccggtgccaccttcccctacggcaaggacccccaggacagcaacatccgcatcgctccctccctgccgccggtggcggagctggagcaggccatcgccgtgttctgcacctgcctgaagctggccgccctggaaaagctgggcgtgtgagctgcaaaacctcacgccgcccacataaaaccatccccccggcgacgcttcacacccccatataaaatccccccggcgaagccggggggatttctttttcttatttatgcagcagcgggctcagcggtttgtagatcaggaagcacagcgccacgtccagcaatcccttgcacagtgtgaacggcacgttgaacaccatcaggcagttcagcagcgcgttggaggtcggcacctgcgccaccgtccccaggatctcctgatacatccccacaatggcctccagcggcaggccgtacagcaccacataggcgggatagacgatgaaatagttgatgggtatgctgatgaccgccatggcggcggccccggccacggagccccacagcgccccgccccggttcttgtgcttcttgtagacaatacccgcaataaacgcgaacaccgcgcccagcaggaaattggacagctcgcccacgccggcgctggagccgaagggcaggtgcagcaggttcttcaccagctggatggcgacgccgtagacggggccgagggagaacgtgcccagcagggcgggcaggtcggagatgtccagcttgataaaggcgggcatgacggggatggagaactccacgaactggaggacggcggccaccgccgccagcagtgcggccaccgcgatacgatgggtcttttgcttctgagtcataaaaaaacactccttcttgatgataaacacccggaaaattgccttccaaggtgtacgcatcaaaaaagagcatcgcaaaatgccatacacgccttctctcatccagactatactgtcggtaccggaattgcgccggttcctgctgccgcagcagctcgcggactataccgccggtggggactttcaccccgccccgaagacaaatatgcggttgttttcgacaagtatagtaccacgccgccccgcggatgtcaataccgattttcggctttacagcggcgcggttttcgtttacaatataccgtaagaaaggcggtgagacccatgcccgcacggcagatgaccgtatgcttttccggctaccgtccggagaagctcccctggggctatgacgaatgcgatccccgctgcgcccagctgaagcagcgcctgcgccgggcggtctgcgccgcctgtgacgacggcttccgccacttcatctgcggcatggcccgcggcgtggacacctactgcgccgagatcgtcctggccctgcgtccccaatacccggacctgacgctggaggccgccatcccctgccccagccagtgcggcggctggacgccggaccagcaggcccgctggcacgccatcgtggaccgctgcgactttgaaacggtggtccaggaccgctacggccccggctgtatgcagcgccgcaaccgctacatggtggaccacgccgcccgcctcatcgccgtgttcgacggtcaggacggcggcacccgccgcacggtggaatacgccctgcgctgcggcctcgaggtcgtctacgtggacgcggaatagcccccaaaccttccccctggaggtccgcggtgttgaatgacaggccggtggcctgtcagatccgcggaccgaccgacccgcagggagacaggtggcacggcgaagccgtgacggatgaggtgtagccgccgcagcggcgtaacccctccagtcccaaaaaagggagcacccctgcggggtgctccctttccgtcgttctttatctctttttcccgttgagcgccaccatgcccgtcagggacaggagtgccagcgcgccatacagcgccgcgccggggtcggcggtcttggggctgcccttggtgtcgtcggtcttggtgtcggttgtggggtagtagtaatagccgccggaggagggattcttctcccacttggccgtgagggtcagcggggcgatgaccgacttgctgaaatcatacgcgccgtctgcatcctcccagccgataaatgtataccccgacttggtgggatcatcagtgggtttggccaccttgccgttccatggcaccagcgtcggctcaggcttcgtgccgtcgcccgtatcaaagcgcaccgcgaaggtgccgccggtgacctgttcaggccctgcctcatttacgatcgagccgtagaacgtgccgccgctaatgcttccagtactcacccaactcaaagagccctttcgaatcatcactgcaccgtaaaaagtgccaccggtgatcgttccattgttctccactgtcccattatatattccatatattccggcttcaatcttacctgctgacctattatacacagttccgttaaaaaccgtcacggcagcggcgccttcgctacgcttgatcgtgccctgattgttcaccgtaccatccactgtaccgccatcggcatatatgtcactattctccctgttccaaatcgcatcgtcacttcctgtgcacttctcgatcttagccgttccgcccatgtacagattcccggaagaatatataccgccgccacctctactcgcatggcaacccgtaatacatccaccggtcattttcagtgccgcataatcatcaacgtacacgccgccgccatactcggcattaccgccggtgatggtgccggtgccctccgcgctgctgtcctgtatggtcagggtcgcacggccactcaccttgagcacactgccggtaccggtcatcctcaatgtacagccgttcaggtcgagggtcaggttttttgtaatttgcagcgtggcagcgatctccgtattggaattcaatgtaatcgtatcgccagcgtttgccttgtctatcatcccctgcaaggtcggctccgtcgcggcggcggtgcacaccaggggatttgttacatcccccgatgtaacaaaagctgcccatatgggcagcgcgcataccaataccagggtcatcaggatggggagcagtcgtctcttcatggcggttcctccttctatggctcacatatttctctcccgggcctgtgtgccgcaaaatttcttgttgggaaagttttttggcgcgcaggctctgttgtacgaccatcttaccagaaagtgtcgcgaaaggcaacgggaatatccagatgtcggcataacaaatccgcgtaccaaccattaaccaaacttatatcatcaaaggacacgtcctcgttagccttcccctcgagggcaccccagtgcgcgccgcgaagcaagtgcccttggggtacacactgggggtgtgcacagctgaaggtgcccccgcagggggcggatgaggggtccccccccccgcaggcggtaccccccccatactcggcggcgtcagccgccacctaccaaagccgccctcggggcggctttggcgcgatttgataatcgcccatgcgtccaacacaccagcccctacctccacaccgcatcagcggcagcggcgcaagaggtacaagcaatcccctgaaccgacaacgacacccaccgtgcccattccgcgaaatcagcaccgtcaaatttgcacttaccctccccgcgcaaggaagtcttgaaacgtagtttcaagtggcgcttttggttacttttgtcgccggggacaaaagtaactcgcgctcgggagcgcgaaactctccccccgcgcccgcaggcgcagcatcttccgccgccgtggcggcgccccccaacaaaacataaaaaagagaccgccttccgctactcctgataggggtaccttgaagcgtgtcctcggattaggcaggcagtgcaattgtactgtctgccttttctgttgtctctccgcatagaagcatatcgtctgtctcgttgaggttgaagtcccgaaaacagatgtggatcttctgcggtgcgtgcttggagtatttgacctctttctcatacacgatgattttcgccacaaaggtgcggagcagttccggggtcagttccgtcatgtcggtgaactttctggccttggcgatgaagttcttggcgttggccatgctactgcgtagtttctccaggcgctcctccgtggcagggatggcttcggccagctgcgctttctccttggagtatgcctcagacagcaaacggaactgctcattgctcacccgtcccaaggcgctgtcctcatacatccgcttgaacactacatccagttcgccatcccgtttccgcatcgtggacaattcccgttccaacccccggatctcctttgccacctcagtagattgcttttgctgaatatatgcggcgaaccgctccgggtcgctcctggcaaactctgtggctctgcggattgtttccagcacgatttccttcagtgccacttcccggatatagtgagcgctacacacttctgccccgtccttcttgtaggtgcggcaggtgaaatgattctgttccggcttcatggtgtgcgcccggtgcaataccatgggcttaccgcagtccgcacaatacaccaatccagagaacatattctgctcatccatattcgtgcggcggcgcttatgagatcgcacctcctgtacgatatcccaggtttcctgatccaccagctcttcatgagtattctcaaagataagccactctgatttggggcgttcacatcgttttttgtccttgtaggacttggtgctgtagcgaaggttgaccgtgtgcccaaggtagaccatgttctgaagcatatccgccaccatgtcgccagtccagttgtagggccgctctgcattcagcccggaatgggatgtgccgaatttcgtataggcgtacatggatggactgtagatgcattctttcttgagctgctttgcaatctaggctggtcccattccgccggcgcacatggcgaagatgcgtttgacgacagccgccgcctcctcatccaccaacagaggagagtccttggttgcacccttgcggtagccgtaaggagctcgtgtccccacccggattccccgctgtgccttggcgttcactacattccgcaccttgcggctgcagtcccgcacgtgccactcattgaacaaattcttgaaaggcatcagctcgttgctgttttcatacttggtgtcaacattgtcgttgacagcgatgtagcgcacatcattggaagggaatatctcctcgatataaagaccggtgtgcagttggtttcttccaaggcgggaaagatcctttgtgatgatgacggcgatgtcgccgttgctcatgtcatccatcatctgttcaaaggctgggcgattgaataatgaggtgtgatagcgatagcggcaaaaagctaataaaatcaatggttttgcggacagcggatagacagggaatgtgttaaaaactgaatacgcacacaaacggcgttaccttaacccctttgggggagaaagtaacgccgtttttttatgcccgcaggaaaggaggtgcagccggaatgtatttcacaaagggcaagcagcgggcgtttgaattgctcatgcagcagaagccgggatttgaccgctatcaatccggttgtgccggagatgatgaagattgcggcacttgccgtttctaccgccccgggtggaaatatgagttttgcgttttcaaagagtgtccctattgccccggcaaaaggacgcggaaaacgcacgccagcatggacaaatagacgggcaaaagcccttgtgccatgcggctttgcagacgcgaaaacggcaaagggcatattgcaataccaaaacagccgaaaacggctttctaattgtccacgcataccaagagaggaagtgaggaaatatggcagttttcagagtggagcgaaatacgggatataccgttatgagcaaccaccacttgcgaaacaaggaattgtccttaaaggcaaagggcttgttgtcgcaaatgctttcgctgcccgaagattgggattatacccttgcgggcttatcccatatcaaccgggagaagatcgacgcaatccgcgaagcggtcaaagaacttgaaaaagccggatatatcgtccgcagccgggaacgcgacgagaaaggacgtttgcgcggtgcggattatgtcatatacgagcagccgcagcccaaagagccggaagcagctaccagcagcgaacagccgcctacatcggatttacctacattggaaaatccaacattggataatccaacgttggaaaaacctacgttggaaaaacctacgttggaaaatccaacgcaattaaataaagatatatcaagtaaagaacaatcaattactgatttatcaagtacccattccattcctttccattccctaaatcccttgccttatgagcaggacgaagcggctacgccgccggaaaggaaaagaacggaagcgaaaacaaacagcgcaatagagatttatcgggaaatcatcaaagacaacatcgactatgacattctcattcaagaccccaaaatggataaagaccgtttggacgagattgtagaaatcatgctggaaaccgtctgcacagcccgaaagacaatccgtatcgccggggacgactaccccgccgaacttgtcaaatcaaagtttatgaagctgaatagcagccacgttgagtttgttttggactgcatgagggagaacacaaccaaaatccgcaacatcaagcagtatctaaaagcggtgctgttcaacgcaccgagtaccattgacagctactataccgcccttgtcaatcacgacttttacggcagcaaatgagcatagccgcagtttaccgggaaaggagttgataccttgcaggaggaagtaacccaaaaaacgattgccctatccgtcaatgtgggaaaaggcgcggcaaggcttaccgaacaggcgttgcagaaagcaatcaagaagtttttggagcagaaaagcaaagccccgcatgggaaacagaccatgcggcagcttatgaagcaaaatgcgggtgtttccaacatcgagatcaccgacagcaatatcaaagcctttgagagtaccgcgaagaagtacaacatagatttttcgctgaaaaaggttaagggcgaacagacccgttaccttgtgtttttcaaaggcagggacgcggacgttatgaccgcagcgtttcaagagttttccgcaaagaagctgaacagggataaaaagccctctatccgcaaagcccttgccgcagcaaaggacaaggcgaagcagcttaacgccgcccgcgacaaggtaaagaaaatagacagggggcgcgagatatgaagcagatgaactacaaaaagttgataatcccgaatatcccctatgtgttctttgtctatctctttgataaggtgggacaggcggtgcggcttgcccccggcgcggatatttccgaaaagatactcaatatcacacagggattttccgaagcgttttcaaatgccttgccgagcgttcacccgttggatttgcttatcggcattgtcggcgcggtggttatccgtctgattgtctatgtcaaagggaaaaacgcaaagaaataccgcaagggcgcagaatacggcagcgcacgttggggcaacgccgaagatataaagccctacatcgacccggattttcagaacaacatcattttgacgcagaccgaacgccttaccatgaacagccgcccgaagcagccgaaatatgcgagaaataaaaacgtcgtggtgatcggcggcagcggcagcggcaagacaaggtttttcgtaaagcctaatttaatgcagcttcattcttcctacgtcttgaccgacccaaatggtaatttacaataaggataaagggagcgcgcaccctcaagaaaggaggttacaccccatgaagaaacagccggacaagggaaaaatcacagccctgtacgagcgtctttcccatgacgatgagcgagccggggaaagcgtgtcgatagaaaaccaaaagcgcattttggaggactacgcccaaaagaacggctttacgaatatccggcacttcaccgatgacggagtgcggggaacgactttcaagcgtccggggctggacgctatgctggaagaaatccgggcgggaaatgtggctacggtcattatcaaagaccaaagcaggattggccgtgatgttgtcgaagtggggcttttgaagcgcacctttgacgagtaccatgtacgctttattgcggcaaatgacaaccttgataccgccaacggctttgatataatgtccattttccgagatgtgataaacgagtggtatgttgccgacaccagccggaaaatcaagaccgttttcaagtcgagaatggaaaagggcttgcgctgctccggcagcgtcagctatggctaccttgcgtccaaggagaacaagggcgaatgggtaatcgacgaggaagccgccgccgttgtgcgccgtatcttccacagcgttgttgccggggagagtatcgccagcatagcaagggcactccgcgccgagaaaatccctatcccgtccgagcattggaagcggataggcgcacccgtccggtcggcgaagtacacagacccctacgcatggtcaacaacaactatcagctatatcctcaaacgcccggagtacacagggcgcaaggttttagggaaaaccgtctgcgagaactacaagaccaaaagcacccgcaagaccgcgccggaggaacagtatatttttgacggggaaatccccgccattgtggacgaggaaacatggaacaccgtccagcggcttatgggaacaaaacgccgcgcccccaagcggcagaacaccccaaaccgcttgaccgggcttctctactgcgccgactgcggcgcgaagctgacccaccgcagcagccttgtgcaaggcaagtatctggacgacgcttttgtgtgttccagctaccgccagcttacccgcgactgcaccatgcactatatccccaccgcgaaaatggaagccgccattcttgccgcaatccagcgcgtgagctggtatgtacggcacaatgaagcggagtttatcgagcgtgtgcggaaagccaccgaccagcaccaagaaaatgccgtcaaggagtaccggcagaaagtgagcaaggcgcagcggcggtataaggagctggacgggcttgtaaaaaagctgtacgagggaaacgccacaggcaagatacccgataagcactttacccgtctgcttgccgaatatgacgaggaacagaccgggctggaagccgctatcgcacaatggcaggaagcaatcgagagctggaacgccgacaggctgaaaacagataagtttatcgagcttgtgagccgctacaccgacttttccgaattgacaacgcccatgctcaacgagtttatcgagaaagtggttgtccatgagggcgaggggcgcgggaacagccgccgccagcggatagatatttacctcaacttcatcggcgcgtttgaagtccccgcccatatcgttaccccaatggaagccgaggaacaacgccgccagcaggaggaacaggcggcaaaggaagcccgttcacaggagcttgccaaagcgcgggaggaaaagcgcaaggcagagaagcgggagtttaccgcgaggaagaaagcgggcttgctgaccccggaggaacaggcggcagacgaagcgcggttagcccataaccgggcatggcaaaaggaatggcggaagaaacggaaagccgccgagccgcccaagcccccgaagccgaaatccttaaaggagcttgccgcgctgcaaaaggccggagccgacctcacgccggaggaagcagaacgccttgccgcttaccgcgagaggaaaaaccgccagcacaaggcatggtatgaacggcagaaagcagcgcagccgcccaagccccggacgctcaaagagcttgccgccgcgcaagtcgcgggacagcccctcacgccagaggaaacagaacgccttgaagccagccggagccggaagaagaacgcctaccaagaactgaaagcccaagcggaaaccgaccccgccgcagccgccgagcttgcaaggcggcgggcttaccactcggaagccaccaagaaatcccgccagaagatgtacgaggaagccgcagccggaaaccccgcagcccaagcccggtatgagaacttccttgctgcaaggcgggagaactaccacaggaagaagcacgacgagaaaggagaacaaatcgcatgagaagattgattgataacgggaaccgccccattaccccaaagccccatatcggccactacgggcggctgcggaaagcctatctggaacaataccgccaccgcctttataccgcccttgtagccagcgagaagctatacccccaccttgcggaaacagaccgggcggcgcgggatatgctggactacctcatgccccgccttgccagagaagcgggagccaccgaagccctcaaagccgccgacccgatgaaatgggtaggtttgatgaacaactgcaaggcgatagccgaggaaatcgtaatgcatgagttaatctatgtttaacggtcaagagccggaaaaatcggaaatcttgcgataacagccgccctgacgaaccattccccgtccgggcggtttttatcgtcaaaaacgccgttttctccaagtcaagagccggagaaaacacccgaaaaatgcccctattgcataacaggggcgcagaaaggagagcttatgagaacagggcttaccaagcgggaaaagaccaccgacatttggtttgacgagaaagacccccttatccatatccgcacccacaacaccgccttgaagaagcgtctgcttgcatacagccgccgttatccggcgatctgccagcagaccgacgcagacccggaaacgggctgcatggagtttgatattgagaaaggccgcttctctttccgtctgaccgccccatacagtgaggaacggcgggaagcagcgcggcagtttgccaaggaaaacaatgccgccagcagactgaaatgaggtggatttgttcataatcctgtgctatacttctcttgaaaaaagaacaacaaatcgaaattttgaggaggtttactatgatatataagtttacggaagtattaaacgatcttgttaattattttattcttggtgacattttactactggaaagttggaaaagagccaataatctttcagacgatttggcaacggaatttaccacaaatgaaagtggggatagggcttttagtgaaggtattgttatccccatgagtggcattgaaaactatccttataccgtattgtttaatctctctggtgataaaccggagttgtgcaaaggggaaagccgattgcagtttagaaggagtggttattccctcaaagtggataataatatgcttatgctttttacatggcacatattaaaacagtttactcccgaaaaagtgaaaactctaatttcttattacagacagaataaaaagccaattgtcgaacttgcaaatggctggtatcatatcgagattttgggtggagaaaccttgcaggacggggactatgagcctacatttgaatttgtgatacaaccaatagaaaatgaagaaaaagccgcaaatgctgatatgaatttaagctttgaaattataagttctgcttattaaaactaaatatattatccacaagggcagccgagaaaatcgactgccctttttccatgcctacgggcagaaaggagcgaccagctatgacgaaaccgagggagaaaacccgtgaggaattgaccgccgagattgaggaaggcaagaagaaaatccggcagtttgaaaaccgggagaaaatcatcaagcagaagctatccgtcgaggaacgcaaggcgagaaaccacaggctttgtaagcgcggcggcttcatggagagccttgtgccggagctgattgccatgccggacgaggacgcgaaagcctttttacggcttgccttgatgagcgagccagcacaggagtttttgaaaaaacgagccggggacgggaatgcggagtaatccctttggaacaaagggcgcacttatacacccttgcgggcgtgtgcgctctgccgagggctcatctccgcacagggaactttccccgcgctccgatatggcgactttgccgcaacaaggggctgcaccccttgcgccgcttacgcggctatccctgcacacccacaaaaacagtacacccgccgttggtgtctgtaccatttttgcgggtcttgttatcctatccgggaggtgatacccatagccatctatcattgtaatatcagcattgtcagccggggcaagggcaaatcagccgttgccgcagccgcctaccgaagcggcgagaaaatcacaaacgagtgggacggaatgacccatgactacacccgcaagcgcggcgttgtccatacggaaatcctattgccgccccatgccccgccctctttctctgaccgcgctaccctatggaacagtgtggagctttacgagaaagccgggaacgcccagcttgccagagagattgacgcagcactccccatagaattatccagagaggaacagatccggcttgtccgggaatactgttcctctcaatttgtttccagaggaatgtgcgttgactttgccattcacgacactgacagcggcaacccccattgtcatatcatgcttaccatgcgcccccttgacgagcgcggcgcatgggcggcgaagtccaaaaaggaatatgaccttgacgaaaacggcgagcgcatacgcttgccaagcggcagatataagacacacaaagttgacctcacaggctggaacgacaagggcaacgcgcttttgtggcgcaaggcatgggcggatatttcaaacgcctaccttgaacgcgccggacacccggagcgtatcgaccaccgcagcaacgccgagcgcggcattgacgagctgcctaccgtccacatgggcgtagcggcttgtcaaatggagaagaaaggcatagccaccgagaaaggcgagctgaaccggaatatccaaaaggcaaaccgccttatccgggaaatccgggcgcagattggaaagctcaaagaatggattggcgaactgttcaaggcgcgggaaactgccccggagcagcccccgcaatcccccggccttgcaaatctgctgatgaaatatttaagcgttcagagagaaaagagccggaagtattcgcagagttggcaaaggcagcacgccgccgatgaactgaaaaccgttgcaaaggcggtcaactatctttccgagcatggcatttccacccttgacgagctggacgctgctctttcctctgtcagcgataaagcctattcaatccgggagggaatgaaaaccgccgagcagcgcatgaaagagctgcaaaaactcatggagtacggcagaaattatcaaacctacaagcccatacaggacgagtatcggcaaatccgctggaaaggaaaacaggagaagtttgcggaagcccgccgcgccgagcttaccctatgggacgcggcaaaccgctatctccatgcccatttgccggagggcgtgaaaaccctgccgatctccgcgtgggagaaagaatataccgccctcaaagcacagcgggaagcggaatatgaaacgctgaaagatacccgcgccgaagttgccgagcttcaaaaaatccgcaaatgcgtggatattgcactccgcgccgaccaaccggcacagacgcagagccgcaccaagcggcaggaacaggagcgataaaggaaaggacgggcaagctgttcggcttgtccgccctctgtactattggatggataaaaggcgactcatttctttttgaattttgttacaatcttatttacccatatatctacaattatatcacctatggttgcaaggaaatcaactattaaatcaatcataagatcacctcttaaatccaacttgctaaccccattatatttgaaatctgtgaacaattcaaccacagaaagagaggtatcaaccatgtattacacccaagaacagatagaccgggcgaaccaagccgaccttgtttctttcctacaatcacagggcgagcagcttacccgcgccggaaatgaataccgctggaaacggcacgacagcttgaccgtccggggaaacaaatggtacaggcacagccagagcaagggcggcggccccgtcgattttgtcatggagtttttcggcaagagcttcaccgaagccgtggaacttctcacaggagaaaagggagccgtaccgccgccggacagaccttgccccgcgtccctatccgacttccggctaccgcccccaaacagcgacaatcgaacagcgaggaactacctcacagcagcccgccgcattgatgaagatgtgacgggctttttctttgcccgcggcgatatttacgaggacgcagcccaccacaacgccgtatttgtggggcgggacgaggacggaataccgcgttacgcccacagcaaggggacggcgggaaacttccggcttgatgtgaaaggcagcgacaaagcctttaatttctgctaccggggcgagagcgacaggctttttgtctttgaagcccccgttgacctgctctctttcctctgcctgttcaaaaaggcatggcagaaacagagctatttgtcattgggcggcgtgggagaaaaagccctgttgcgtttcctctctgaccgcccaaacatcaagaccgtttacctctgccttgacagcgaccaagcgggaaacgacgcttgcagccgccttgcggagcttgtgccggagggatataccgtccaccgccttgtgccgctgtttaaggactggaacgaggtattgcagcaccgggcagaaatcacagacgggaagtatatccgggaagcggtttacggcttgaaagagccgccgcaggaagaaaccgtcgagattattcgcatgagcgaggttgacacacagaccgttgaatggctatgggagccgtatatcccgtttggaaaagtaaccattgtgcaaggcaatcccggcgagggcaagaccacctttgccctacgccttgccgccgcctgcaccaccgggggaacgctgccgggaatgaagcccttgccgccattccaagtgatttaccagaccgccgaggacgggctgggcgataccgtcaagccccgcttgatagaagccgaagccgaccttgaccgcgtgcttgtgattgatgaagccaagcgggagcttactctctccgacgagcgcatagaaaaggcaatcacgcagaacgaggcgcggttgattatccttgaccccatacaggcgtacatgggcgagaaaaccgacatgaacagggcaaacgaagtgcgccccatgttccgccgccttgccgatgttgccgagcgtaccgggtgcgccgttatccttatcggacacttgaacaaagctgccggagggcagagcgcataccggggcttaggttctatcgacttccgcgccgcagcaaggagcgtcctgctgatcgggcgcgtgaagcgggagccgaatgtgcgtgttatcgtccatgacaaatcttcccttgcgccggagggcaagcccgttgccttttgccttgacccggaaacaggcttttcatggataggcgaatacgacataaccgccgacgaactgctatccggcgcgggcgggaacaccaccaccaagaccgaacaggccgagaagctgatacttgacttactcgcagacgggaaagagcttgccagcgaggacattgtaaaggccgcagccgaagctggaatatccgagaggacggttaaaaatgcccgccgcaatcttgatacccggatagaagtcatacgccggggaaatcaatggtactatcgcaggaacgaagccaagagtgcaaagtaagaatgcaatccgtagatacctttgcattgttgcacccttgcacccttacccgatatgaccgcctcatgtgccgaccacatggggctttatctttgaaaggagagcctatgaacaatgaaaccagcaagaccagcacccccgcagccgtttcccctctgaccgccaaacccgaccttgtgaagaacatcggcggcacgacctttgacattcatatccatttcagcgaaaccagccgggaaacctttacggacaaggttgtgcgccttatccagaacgacagcggcgatgaaaccgcttaaaagcaagatactattttcttgttccttattgacaaaacccgaaaggcaccgtcttaatcgagtgcggaaagctcttgcagcgcggcggctacaagataaaagtgctgaatacgataaacttcaagaaatccatgcgatataacccctttgtgtatatccgcagcgaaaaggacgtgttaaaggttgtcaatacccttattgtcaataccaaaggcgagggagaaaaaagcgcggaagatttttgggtgaaagccgagagattattatattgcgcgttgatcggctacatttggtatgaagcccccgccgaggaaatgaactttacaacgctgcttgaacttatcaatgcaagcgaagcacgcgaggacgacgaggaataccaaagccccgttgatctgctctttgccgatttagaagaacgcagccccgaccatttcgcggtgaagcaatataaaaaatacaaattggcggcgggtgttgtatgctctaaaagacttcttaatcaagcagttgggaagtctcttagaacacacaacctaaaatcgaagaaaggagcgcaagttatgagaaaaaacgagaaaatcactgctctgtacgaacgattgagccgtgatgactttggtaaagatgatgaccaacagcgtgagagtaattccatttccaaccaaaaagcaatgttggaggagttcgccgcacggcaggggtttacgaacattgtccatttcacggacgatggcattagcggcacttgctttgaccgtcccggatttctggcaatgatgaaagaggttgaagccggaaatgtggagtatctgtgtatcaaggacatgagccgcatgggtcgtgactatctgaaagtcggtcagattatggaaatcctgcgtcagcgtggcgttcgccttatcgccatcaatgacggtgtggacagtgccagaggggacgatgattttacccctttccgcaacattatgaacgagtattacgccagagacaccagccgtaaaatccgttccactttccagtcaaaaggcaagtccggcaagcacctcacaggcacggtcatttacggctatctctggaacgaagccagagaccaatggttggttgaccccgaagccgctgatgtggtcaagcgcatctttgccatgacgattgagggctacggtccgtatcagatcgccagcaagctgaaagaagaaaaagtcctcattccgtccgcttaccttgcccagcacggcgagggcgtgaacaagaataagactttcaaagatgtgtacggctggggttcttccaccatttgcaacattcttgaaaagcgtgagtatctgggacataccatcaacttcaagacccgaaagcacttcaaggacaagaaaagccattatgtcccggaggacgaatggacaattttcgagaatacccatgagcctatcattgaccagcagacctttgaccttgtgcagaaaatccgtgggaatgtcagacgctacccggacggctggggcgaagcagctccacttactggcttgctttattgtgccgattgcggcggtaaaatgtatgtccaccgtaccaacaacggcaagcgtatttctcaatatacctgttcccaatacagcaaagtcccagttggaaagctctgcacgacacagcaccgtatcaatgaagatgtggtactgtcccttgtttccgaaatgctcaaagctattgccgagtatgccaagcatgacagagccgagtttgtccgtgtggtgcaggaagcacagtccagccagcagaccacagaggtcaggaaacagcggacacgccttgccacagcaaagcagagagtttccgagctggaagtcctgctctgcaaaatctatgaggacaacattttaggaaagctgtccgacagcagatacgccactctggacgctcaatacgcaaaggagcaagccgagcttaccgctgaaatctctgctctggaaaaggctgtcaagagctatgaaacgcacgaaaaggacgctgaccgttttatcgctctgattgataaatatgagaacttcgacaagctgaccattgccatgctcaacgagtttatcgagaaaatccttgtgcatgagcgtgaccgtaaaggcagtatacagaccacacaggaggtcgagatttacttcaattttgtaggcaggttcgttcccccggcatttggcgaagtggagctgaccccggaagaattagaggaaatccgcaagcgtgaggaacgcaaggacaggctccaccagaactacttgaagcggaaagccaatggtaaacagaaagagtatgaggagcgcacgaaagccaagaaaaaagcggagattgaagccagaaaacaggcaatccgcaccgaggatattgccagaggggtatttatcccggtgagcagtttgccgcagctgggaccgagaaagggagcgtgattttatgaaagagttgaaaccgagaatccatgagaacggtatggactatgtgttggtgggcgactactatgtgccggacttgaagctgccggaggaacgccgacctattgggcattggggacgcttgcaccagtcctatctgaaattgcaccgtcccatgctttacaacgagctaattttgtccggcaggctccacaccgtcgttgccgatctgaacgagcaggcggcagacaggctggacttgattatccggcagatgatgaaagccgagggcgtgaccgaagccatgaaagcggaaaatcagatgttatgggtgcagtcaatgaactccatccgctgccgggcagaggaaatcatcaagacggaactaatctactgttgagagaggtaaagctatgattttggaagccatgtataatggggagttttatccctgcgagacagttgtacctacatcaccggaataccgaaaggcagtcatagcctgtgaaaagctcatggagcagttgtcccagcggctcagcaaagaggactatgagctggtgcaggaactccgggcgcagacagcaatcgcccaatgtgaagaaagtgaaagtcacttcaagtatggcttttccgctgggctgatgttcagcaggaagcccatgaacaagtgcagcagaagaaagaaaaatagatgaagaaagccgcctgagcagaaagagactgttcgggcggtttcagcattcgccagtagatttattcacactcttgtgataaaatttactacaataaagagcgtgatagcactaattttatggggggatgcttaatgaatagaattttgaaaaaatttttacagcggggtgtcgatttaagtcctgtgggagttgaactccgtgaggataatacaaattatttttgtaccccaaaaggggcatcggtttttggatgggcagggatagatggtatccacttctgtttcattcgtggatttggagagatggttttctctgtcagccccatgaatacttctcctgattatgttcatccagtagctgaaaattttaccgactttctgcggcttatactggcttgtggtgatgtggcggcagtggaacaagcgtggatgtggaacgaagcacagtttgaagcctttctcaatgaaaaccctacaacccaggaacaacagcaaactttatcggaaatttcagagaagatgaatttgttgcctatggaacaaccgtggacatatatcaaaaacctgcaatcttcctttgattacagtcagattaaatacacagaagattattacgataatgatatgacttcagaagcagaattggttgcccctgaatggaaggtctactttgatggagatttctggggacatcgaggtaaagaccgtgccggaaaagagatcaagctggataaacaattcgattgggctggatatcattgggtaattccggcagcttattcatgtagcaaaggacttgtcgttgatttttgtatgcgagttgattcagaaagcatccgtgacttcatgaaaaaatggaatctggactgggaaaatgactcatgtgaaaattttacccgtgagcaacagatgcagatggaatgggaaaacccactttgttttaacttcaaaccttgcttgaagttaaacgagaaaatattacagacaacccatggctgcgctgtgagctttaatccttgtctgccagatggcgttatcaatgagttggaagcaaaatgggcaatcgaccattatgggctggatagtacttatggctgggtcatatgcagagacgtatttccttggggaaccaagcatcaccctgaaatcaataaactttttcttacaatggagcagcaaccaggacaagttccaggctcacatttcaaagttcacgcacccggagattcatttatgttttcccatcctgttagcggaataacccatacactgaccgtgcaggaaatagaacagcagacagttcctcaaaatagttttggttctgatcgctggatttatccgacacattatattgccatgagttatacacttacccctgaaccgatggagaacatttcggtttttgactgtgatgaaggcgatagaccgatagaagttacaccagacgatcattcgttccgtccagttggcagtagttcctgttttgttgttggtgttattggtggtgcagatggtccgacagcagttatatatggaacaaattcacaagaaaaacttcatgctgcttgttctgctctgcactttgaaccggttggtgatgatgtcgagtggcgtatcgtgttcaatgttacgcagtttgacaaagaaacattcccaattatctaaaaatacccttagaactctaagggcgcacttctatactctctgtcgagagtagtgcgtcctgcggagcttcattctccgtcagcagaagaaaactgcatgaccgagaatgttgcgtcacttcgttccgtcaaggtggctacacccccttgcgccgctaaagcggctatcccctgtggacttgccgtccgcaaacggttttgacaaaccgttcgccgccagcaagtttgaaaatcaagaatcttaatttgataaaggagtgtgattctatgaaaaagaaattacccataatcctcttgggtgttattttggcttgtgtgttggttttcggtttcctttatgcaaacaatgacattggtaaaaccgcaaacagtttagaagcagacattcgccaatctcaaaaaattttggatgattggattgttgatggaagtatttccgacacaatggctgcatttatttcttacccacaggacaagacagaccacactttttctgtctatgtaaatcgccctggcttgtcttttggatatttcttccgtggtggtggagatatagttgaggttgatgattacattgcagagtttgttgttgagggaaataacgaaagggcatttatctcaatgaatacccaaaatattgttcgacttgaagtagatgatggcaacggcattcaggtgattgatattgatagtggcaagcctttcgccattgtcctgcccctcaatgtaggaaacatctgtttctatgatacgaatggaaatgttgtggaatatcttcgccaacaactttgaccaacttcaatttaccgaactgaacacaacaactgaataccgaaaaactgaccgttgactggtcgcaatctgcgaaaagttgacggtctttttttatccccattttcaaaaaaggaggtcacgaaaaatggcaaaaccgaaaaaccttgaacagctccgagccgaaaaggaacaggtcgagacacagcttgcacaggaacagcacaagctggagcgtctggagaacagaaagaagtatctggagaaaggagagagacaaaagcgcacccatcgtctttgcaatctgggcggcacgattgagagccttgccccggagttcaaagatctcacacgcaccgaaatgacggagctgatggagtacatcttttctctgcccgaagtccagcgagccgtccgtcacatggcgattacccacatcaaccaagcgagcagaggaaaggagcagaaagccgatggcaatattccacttcaccgtcacccagaccaaacgcagtaaaggtcagtccgctatcgcttctgccgcctaccgttccggcgaaaggctgtatagcgagtattacggcgagtacagcgactacacccgaaagggcggcgtgatatgctccgacattctcctgccgtcccatgcaccgaaagaatacgcagaccgtcagaccctatggaacgccgtggaaaaagccgagcgtggaaagacggcacagcttgcatacagttttgagatttccttgcagaatgagttttcccttgaagaaaacatcgctctggcaaggaaatttttgttggagcagtttgtgagccgtggcatgaccgttgatgtttcctttcacgaaaaggagcatgaggacggcggcacacccaacccccattttcatttcctctgtcctatccgtcccatcgagcaggacggcacatggggactaaagcaacgccgagtgtatgcgctggacgaggacggcaaccgcatccgagaccagaacggagagtttgttttcaatgccgttcccactaccgactggggcagtcccgaaacgctggaacactggcggcagacatgggctgaaatgtgcaacgccaagtttgcggagaaaggtcttactgtccgtatcgaccaccgaagctatgaacggcagggcgtggatttacttcccaccatccatgagggcgcaaccgtccgggcaatggagaagaaaggcatacgcaccgaaaagggagagttcaaccgctggatcaaagccaccaatgccgttatccgggacatcaagaagaaaatcactctcctgtttgattggattgccgaagcaaaagcagagcttgccaagccgcagacccccgaccttgtttctctgctgaacgcctactacacccagcgcaaagccggggcttattcccagaaaggcaaaatcagcaacctaaaggagatgaacgagactttcaattatctccgggcaaacggcatttacacccttgaagatttggaaagccatgtcaatgaacacagctccaccacagagagcttgaagaaaacgctggacgggcagaccgcacgaatgaaagaaatcaagcggctttatgactactccgctaccttccagagcttgaagcctgtctatgacggcttgcagaaaatcaagtttgagaagcccagagccaagtacaaggcagagcatgaagcggaactgaaacagttctacgccgccagacgaaagctgaccggggagttcccagacggcaaggtggatatgaaaaagctgtccgacgagtatgacgagctggaacaggcgcacaacaccacctatggcgagtttaagaccgtcagagacgatttacaccgcctttggaaggtcaagtcatgtgtagatactgccgcccgatttaacgagcgtacagaggaacaaaagctccaaaatcgaccccaaacacgacagaaaaaggaggaactatcccgatgaattacacccaagcacagattgaccgggcaaacgccgtcagtctggaagattttctccgcacacagggagagacacttatcaaaagcggacgggaataccgctggaaagaacatgacagcctgaccgtccggggaaacaagtggtttcgccacagccagagcaagggcggctatcccattgattttgtcatggagttttacggcaagtcctttcccgaagctgtccagctcctgaccggcgaaagcggcgaggggcagaccgaagccagcacaacaccgcccacagcgtttcacttgcccttgcacaacagaacagccgacagagcaattcaatttctttgcgaaagccgaggtctcaacaaaacgcttgttgaggcttttcttctttccggggatatttacgaggaagcaaagcggcacaatgttgtgtttgtcggcagagaccgaagcggtacgccgagatacgcccatgtgcgaggaacggcagacccattcagacaggacattgccgggtctgacaagtcctatccgttccgctatgagggaaacggcaaccagctctttgtctttgaagcaccgattgacctgttatcattcatctgcctttatccgcaggactggcagaaaagaaattatcttgccctgggcggcgtttcgggcaaagctcttgaccgttttctttctgaacgcaaggacacccaaaaagtgttcctctgccttgacagcgacaccgcaggaagcgaagcctgtacccgactggcacagtccattcccagcgagatcgccgtcattcgccttgtcccggcaaggaaagactggaacgatgttctccgtcagcaaggggacattcccagccgcaaatttatagcggaaacaatcacgctacgagagctgcccaccgcccagcctgtccccatgctccgtatggcagatgtggagctgacgagcgtggattggctatggtttccgtatatcccctttggaaagctgacgatcatacagggcaaccccggcgagggaaagacctactttgccatgcgtcttgcggcggcttgcaccaatcgaaagcctttacccggtatggagacacttgagcctttcaatatcatctatcagaccgccgaggacggtctgggcgataccgttaagccccggctgatggaagcggacgcagaccttgaaagagtgcttgtcattgacgatagagacacaccactgacccttgccgatgaacgcatcgcaagggcaatccgggaaaacaacgcaaggctggttatcattgacccggtacaggcttttctgggcgcagatgtggacatgaaccgggcaaacgaggtgcgcccgatattccgcagtctgggagacattgcacaggcgaccgggtgcgctatcgtgctgatcggacacctgaacaaagccgcaggaacgcaaagcacctaccggggattggggtctatcgacattacggcggcagtccgcagtctgctttttatcggcaagctgaaggacagccccacaacgagggtgcttatccatgagaaaagctcccttgcgccgcccggacagtcccttgcattttctctgggagacgagaaaggctttgagtggataggggcttatgacattaccgctgacgagcttcttgccgggacagacaccgcaaagaccgagagcaagaccgcacaggcgcaaatgctcattctggaactgcttgcggacggaaagcgtatgccgagtgcagagttggaaaaggcagtcaatgagcgtgggatttcctcacgcaccatgagaacggcaaagagccgtatcggagacaggcttgtgaccgagaaagacagcacagcatgggtctgctatctccgagactgacaacaggaacacggcaagcgtggcaaagacggcaaggtttttatagataccttaatgttgccgccttgccttgttccctcataccgacaccgcccgatgatgaatagttaccgggcactttttcatttacaggaggattttgaatgaacaataccgcaaccaacaccgccacttgcccgactgtcagaaagcagattggcaagaccacctatatcgtccgtgtgcatttcagcgagaccgccaaggagacgatggaggacaaaatcaagcgtatgctccgtgaagaagtccgcaaaatgtgacttctttttgaatttgatgaaaaagtccttgacttttcgtctctggcaaaacggcaaagtcaatccttatttcttgcggtgcgcgtcttgccccttttgatatagaggaactccgggaactcatgtcctatgatgaattggaacttgatacattgggcgacaggaaaaccgcgcttttcctcataatgagcgataccgacgacacctttaattttgttatcgctattctgcaatcgcagcttttcaatttgctttgtgataaagcggacgacgaatacaacggcaaattgcctattcatgtccggtttttgcttgatgaatttgccaacatcgggcagataccccgctttgataagttaattgcgaccattcgcagcagggaaatgtccgcttctatcattctgcaatcgcagagccaactaaaagccatttacaaggacgcggcagaaatcatacttgataatgccgacagcaccttgtttttgggaggacgtgggaaaaatgcaaaggatatttcggataacttgggacgggaaacaatcgacagtttcaatacttccgaaaatcgcggcacgcaggtttctcatggacttacttatcaaaaattaggaaaggagctgatgacacaggacgaaatagcagttatggacggtgggaaatgtattttgcagctacgcggtgtgcgtccctttttaagcgacaaatacgacatcacgaaacacccgaactacaaatacctttccgacttcgacaaaagaaacgcttttgacgtggaacggtatatgtctacccgtccggcaatcgtaaagcccgatgaagcctttgacatatacgaaatagatttgtccgacgaggacgcagccgccgaggaataacggcggcattttcattttcaacaactttttttgagccgcacagcggcagaaagcgaggtttatatggagtttttcaacagcgcagttggtgtattgcagactttggttatcgcgcttggcgcaggtcttggcatttggggtgccattaacctcatggagggttacggcaacgacaatccgggcgcaaatgctcatgtgcggtaaagaagctaaaccaagacaaaggcagccaaggctaccgctataccgtataagaatggagcagtaacaccaagatgttgctgcttcattttcatatttccaaatttctttgaacgctgttgacttctattacggttagtgatatatttattacagtaaccgtaacaaggaggataaacaatgcgtgataatatgaaaggtggtgcgcttacagaagtgacattttacattttactttctctctatgctccaaaacatggatatgctgtcatgcaatttatcgaagaaaaaacaggtgggcggctttcattgggagcaggcactttgtatggtgcgctaaactctttgcaggaaaagaaatggattaagccttgcggagattgtgaaggtagaaaaaaagaatacatcattacctcactgggaaaagaagttgcgaaaaaagaacttgtaaggcttaatgaacttgtagaggttgcaagtggaattattggaggtacagtatgagaaaaaaatgttatcatttttttggtggtctgttgaatgcacaggcgaattggctgaataaaatgtcggagaagggctatcgtcttattcgagcggggaaaatgttatatgagtttgaagaatgtaaacctaatgaagtaaaatactgtgtagaatttatcggagaaaaatcgaaagagaatgcaaaagactattccctctttttggaagatatgggctataaggtatttttcaaaaatatcaatcttaactattctgtcggtaaggtgcgttggcgtccatgggctgaaaaaggcggacgcattgcgaccaacactacaaccttcaaccgtgaattgttgattgtagaaaaagagaatgatggaaagccgtttgaacttcatacttcctatgaggacaaggaaaactattacagaaatctgcgtaatccatggttgttgatactgcttatgtttgcaatatttgcagttataaatcattcgattgtttttggtgtgcttgctttgatttctctgattcccgttcttatatatcaaatacaaatcatgcacaacagacaagaagcaaaaacacaagaatgataatataaatagcaaatccagccgagccagtcaacggcaagtaaatgggctgcacccaccgttgacagccccgcctgtccttgccggtgggtaatcaaggggcgacagcagaaaatgctgccgccctttcccataattgaagaaagggggattttccatgaccgaacaggaagcctatcaagaacatatccgctatacccatgatacctattgccggattgttattcgccatgcgtcctttgacgctgcccgtatgctggcggcgaggtggagacgggaaatctctcttgaatatttgaccgaagaaaagtttgtcccactaagcaccacagacgagtattttcaagtgccggactatggcgaaacttatctgttttctgtccgggggcagacgatatttttagatagctgttcccttgcggcggctcttgccgggctgccggaacagacacaagaggaaatctttttatattacttccagcacttgacacagaaagaaatcggagaacaaagcggctggacacgcagcacaatcgggcggcatattcagcttgccttgaagcggctgaaagaggaaatggaggtgttgtcccatgagtaaccgacttctcccctatgacactatcataaaggcacatgagggcgaccccatagcgatacaagccgtccttgaccgatacgctggatatatccgctacttctccaacatgaacggttattataactctgatatggaggactacatcagaacaaagctgattgaaagcctgttcaagtttcggcttgaccgataacataaaaactgaatatcccgccgccccgcagcggcacatgaagcagtaaatccgaaaaagatttgctgctttttttgcgcccatttttggcaaatttccaaatgttccgtattagacagtgaagccaaaaaagattgccgtttttttcagacggcgagcaaaacacagtttccaaaacgccttattgtcgggaaagaccacgccgcaggaaaagttcttgccggaaagtccgtcatttttgctttttgcggtgttgtagggagtaaggggagaacgccgcccgcagccttttataaaaaagctggttatagatttcccgaaaaagtggcagtagcaagtgaacggcagtccggcagtttcttagagcaagattctaccgaggtgccaaaattcgcttatcgctcattttgcccctgcgggaatcttgttggggagtgccttccccaaaccctgctatgcggcttgtgccgcttgaaaatcccaccaaaaaatacttaaaaaatcgcccacaaaacggcggtaagtgaaaggagttgatacccataggaaagcgatacaatacgccccaccgaagccatgtagtcaagacacgcatgaccgaagaagaatatgccgacttcacagaacggctaaagaattatgacatgagccaagccgagtttatccgacaagccattacaagggcgaccattcgccccattgttaccgtttccccggtcaatgatgaactgctgtccgctgttggaaagttgatagccgaatacggaaaaatcggcggcaaccttaatcagatcgcccgtgccctcaacgaatacggaacgccctacaatacgctgtccgttgaagtgcgagccgccatttccgaccttgccgccttgaagtttgaagtcttgcgaaaggtaggtgacgctgttggcaacattcaagcatatcagctctaaaaatgcggactacggtgcagccgagcagtatctaacctttgagcatgacgagtttaccatgaagcccacccttgacgaagccgggcggctcattctccgggaggattaccgaatagccacgctgaactgcggcgaggaagattttgccgttgcctgtatgcgggcaaatctccgatacggcaagaaccaaaaacgggaagatgtgaaaagccaccactatatcatttcctttgacccacgggacgcagcggacaacggcttgaccgtagaccgggcgcaagcattgggcgaggaattttgtgccgagcatttcccaggacaccaagccattgtctgtacccacccggacggacacaaccacagcggcaatatccatgttcacattgttatcaattctctgcgtatcgaggaagtacccttactgccctacatggacagaccggcagatacccgtgccgggtgcaagcaccgctgtacggacgctgctatggaatacttcaaagccgaggtcatggagatgtgccaccgggaaaatctctatcaaatcgaccttttgcatggcagcaaaaaccgcattaccgagcgtgagtattgggcgcagcggaaagggcaggcaaagctggacaaggaagctgccgccttgccagccgaggagcagccagccaagcccacgaagtttgaaacagacaaggaaaaattgcggcaggccatacgcaccgcgctgtcctctgccgcaagctatggcgagttcgccgccgttctcttgcaacagggcgtgactgtcaaggagagccgagggcggctatcctacctcacgccggacaggacaaagcccattaccgcccgcaagctgggagatgattttgaccgcgctgccgttcttactcttttggagcagaacgcccacagagccgccgaaaagaccgtacccatacccgaataccataccgctgaaacaaaccgcacagagcgaggaaaaacgcagaaaatcgccccgacaggcaacattcagagaatggttgaccgtgcggcgaagcgagccgagggaaaaggtatcggctatgaccgttgggcggctgtccacaatctcaaacagatggcggctaccgttgccgctatggagcaatacggctttaccccggatgaactggacgcagcccttgtgtctgccaatgcggatttacacagcagcaccgccaagctgaagcccattgaaacggctatccgtgagaaaaaggacttgcagaaacaggtgcttgcctatgccaagacaagagatgtgcgtgacggcttgaaaaagcagaaaaccgataaggcacgcaaagcctaccgggaaaagcatgaaagcgactttatcatagcagacgcagccgtaagatattttcggcaaaaagacattatcaagctgcccacctataaatcgttgcaggctgaaatcgagcagcttaccgccgagaagaacgccctttacaacgagtaccgggcaaataaagagcgtgtccgggagttgcagaccatgaaaagcaatctttcccaaatgcaccacggcgaaccgagcagacagaaaaagcatgaacaggagcgttaaaaaccgccccgaaatgataccgaaaccaaacaaaaacagggatatacccttacccctatccgcaatactccccgacctcaaaacagggcgtacagggcaaaaaatccccgaaaatgataccgagaagatacagttttcccgccctatccgtgatacccacggaaacggcagaaaggagcgtaccaatgccacgcatgagcaacaaacggcggattgaatggagctttttcctcaaccaccgaaaccgaattacctataacgacctttgccgggggtgcacccacgattgcaagcagagtttccgagccgtgattatcctctgccaccggtattactccaagcgttggaaaccaaaggaggacaccgcctatggcagataaccgcaaatattactacctcaaactgaaagaaagctattttgatgatgacgctatcgtgctgttggagagtatgccggacggtattctctattccaacattctcttgaagctgtacttaaaatcgctgaaaaacggcggcaagttgcagcttgacgagaatatcccttacacagcacagatgatcgccactcttacccgtcagcaggtaggcacggtggaacgggcgttagggatttttcagcagttggggcttgtggagcagctacacggcggcttgctctacatgaccgatattgaactgatgatagggcaatcctctaccgaagcggaacgaaaacgggcggcaaggcttgcaaacaaggctttgccaccaccccggacaaacggcggacatttgtccgacattcgtccgccagagatagagataaagaaagagatagatatagagatagaaaaagagagagagttagaaacgggacaagcccccgcccgcagctatggcagatacaacaatgtttttctttccgatacggaactggacgagctgaaagcggaactgcccgacaaatgggagtattatattgaccgcttatctactcatatagcgtccaaaggaacgaaataccgcagtcatgcagccacgatatacaagtgggcgcaggaggacgaagccaagaaaccgccgaaaaaaggcatacccgattacacctttaaggagggcgagagtttatgactgaactttttaccgataccgttttgaatatgatgactactaccgcagagccggaggactacacgggcgaggacggtctgctttactgcagcaaatgccgcacggcgaaagaagcctactttcccaaagaaaccgccgcatggttggggcatgacaagcacccgacagaatgtgactgccaacgggagaagcgtttggaatgtgaatccgccgaggaacgcagacgacaccttaacaccgttatggaactgaaacgccggggctttaccgacctcaccatgcaggaatggacttttgcacatgacaacggcaaatgcccgcagatgagcaaggcacatttatatgtggagcattgggagcagatgagagaaaacaactatggtctgctcttgtggggcaaggtaggcacaggaaaaagctattttgccgggtgcattgccaatgcccttatggaacaggaaatctccgtccgcatgacaaacttttctgcgatactgaatgatttaactgccagctttgaggggcgaaacgaatatatcgagcgtctttgccgtttccctctgctgatacttgatgattttggtatggagcgtggcacagagtacggtttggaacaggtctacaatgtaattgacagccgataccgcagccgaaagccgctgattgtcaccaccaatctaagccttacggaactgcagaatccacaggacaccgcccacgcccgtatctatgaccgagtgcttgaaatgtgtctgcctatcctctttacaggcaagaacttccgaaaggaaacggcacaagccaagctcaatggactaaaagaactgttgaaatgaaaggagttgcctatgacagaaaacaaacagaataacaatgaccgcaccgaccgccgcccggactgcgtgacggagatccgcatgggtaacaccgtgcttgttgtgtccggctttttcaagaaagataccacagccaccgcagccgacaagatgatgaaagtgctggaagcggaaactgctacacaaaaaacggtgatttaacatgatactgaaaagcggtcacgcttttggcgtgaccgctggcggagaaattataggttgaaaaatgcggagagtgctttccccaaatcttcgggagcgtctatgtttacttcatgtccagaatttttaatcactaataattcggcttgtggtaactgcgattgaagctgtaaagaagcctgtttatttgctgcatctttctccccgcagataaccattacagggctattgatacacttcaattctttttggaaatccaagtttatcatggattttgacagattgataaaatccgttttaccaagtcccatgctttcaaatgttcttttaggcataaaccgaaagagcatattttgaaattgcaagagttttttcggcattgtatattgtgtcgcaaccaacgccaaagagtttattttatctggattttcaatcccatattgcaatgcgagaataccgcctaaagatagcccacagatattgaccggttctgaaaattgcttacagtattcggagaaagcaagatataaaacttgatagcagacctctttatcttcaaaccaatcaaaaaggttcgggcataaaatgtccgcacttttccccatagtgttaatcgtatttttccagcttgatgatgtttgccctaatccatgaagtaatatagttttcattttctctcctgcaatgtctgatgtgtatttacggtaaagtatatcacagagttatgaacttttctatcttttttgcagcgagaagccgcacagtaaaaaatcgtcattttgacaggcggtaaagaagcagaagccgctatacagacagccgccccatgtggtataatcgaaatacggaatagtggggctggctgtcggaaacggaggattttatgttaagacagaccaaccaacaaccaattaccgccctttacccaagactttcccatgaggacgagctgcaaggcgagagcaattccatttccaaccagaagcgtattcttgaaacctatgcaaagcagaacggcttttccaatctgcgctggtacacggacgacggttattctggtgcgaactttcaaagacccggttttcaagccatgcttgcggacattgaagccggaaaagtcgggacagttatcgtaaaggatatgtcgaggttagggcgaaactacctgcaagtgggaatgtacacggaaatggttttcccacagaaaggcgtccgcttcatcgctatcaatgacggagtggacagcgcacagggcgacaatgactttgccccgctgcggaatatctttaacgaatggctggtgagagatacgagcaagaaaatcaaagcagtaaaacgctcaaaaggtatgagtggcaagccaatcacaagcaaacctgtgtatggctacctcatggacgaggacgaaaatttcattattgacgatgaagctgcacccgtagttaagcagatatacaacctctgccttgccgggaacggtccgaccaagatagcccgtatgctcacagagcagcaaatccccacgccgggaacgcttgaataccgcaggacgggcagcacccgccgctaccaccccggctatgagtgcaagtgggcgaccaataccgtagtgcatatccttgaaaaccgggaatacacgggctgtctggtaaatttcaagacagaaaaactttcttacaaagtcaagcacagtgtagaaaatcccccggaaaagcaagtgattttcgggaaccaccacgagcctatcatagacacccaaacatgggaacgggtgcaggagcttcgcaaacagcgcaaacgcccaaaccgctatgatgaagtgggtttgttctccggcatactgttctgtgcggactgcggcagcgtgatgtatcagcagcgataccagacggacaagcgcaagcaggactgttatatctgcggcaactacaagaaacgcacccatgactgtacggcgcactttatccgcaccgacctcttgaccgctggtgtactctccaatctgcggaaagtgaccagctatgcggcaaagcatgaagcccggtttatgaagctcttgattgagcagaacgaggacgggggcaagcgcaggaacgccgccaagaaaaaggagctggaagccaccgagaaacgcatagccgagttatccgctatcttcaagcgactgtatgaggacagcgtgaccgggcgcatatcagacgagcgtttcacagagctgtcggcagactatgaagcggagcaacgggaactgaaagaaagagccgctgttattcaagcggagctttccaaagcacaggaagccaccgtgaacgcagaaaagtttatgaatgttgtccggcggcataccagctttgaagaacttacccctactttgttgcgggagtttgtagagaaaatcgttgtgcatgagtgcagctatgacgagaacaagacccgtaggcaggacattgagatttattattcttttgttggcaaggtggacttgcccgaataaccgcccgacctatccgacacaagagctaagtgccggataggaacggcaaaattttttgcacttctattacttctttatcacacatcaacaaagagccagggcatgaagcagctcatggcgggcggcggcgtcgctttgatcggcggcacccttgttcccctgctttctcaactttttggataatgcctaaaacaaataccacccgccgcgccctctcggaaacgggagggcgcgggaaaggagggattaacttttgatatggcagatgattgaagattggtttcgcggcattttgacagacgggattttatcgaacctttccggcttgtttgacagcgtaaatacagaggttggagaaatcgcaacacaagtcggcacgacccccgccgggtggaacgcgggcatattcaacatgatacgcagcctttcggaaaacgtcattgtaccgattgcgggcgttatcattacctttgtcatgtgttatgaactaatccagcttgtaattgaaaaaaacaatctgcacgatctcgacacttggattttcttcaaatggatttttaagacctttgttgcggtgctgctggtaacaaacacttggaacatcgtcatgggagttttcgacgttacgcagagcttcgtcaatcagagcgcgggggttatcatatccgatacaagcatagacgttaccaccgtcattaccgacattgaagcaaaactcgacgctatgagcgtgggcggtcttttggggttatggtttcaatccctctttgtagggcttaccatgaaagccctgtcaatctgcattatgcttgtggtgtatgggcgcatgattgaaatatatcttgtaacgagcgttgcccctatccctatggcaacaatggtaaatcacgaatggggcagcatgggacagaattacttaaaatctttgcttgcgcttggttttcaggcgtttctgatcttggtgtgtgtcggcatttatgcggtgttgatacaaacaatcgcagcgaccgacgacatttccggcgcgatctgggcttgcatgggctataccgtcctcttgtgctttacgcttttcaaaacgggaagccttgcaaagagcgtcttttcggcacattaagggggtgagttatgatttgaaaatcggtttaatcgacgttgacagccataatttccccaacctctgcttgatgaagctatccgcgtatcataaagcaaaggggcatacggtggaatggtggaacgcaaaggggcggtacgaccttgtatataaaagccgcgtctttacggacacctattccaaagacacgataaccgttaccaacgcggaacaagttattttcggcggtacgggctacgacacgaaaaaccgcttgccgccggaagtggaacacagttacccggattattctatctacccgcagtttttcgggattgcctacggctttttaagccggggttgtccgagaaattgcgggttttgcattgtcagcagtaaagagggacgcaaaagtgttaaggttgcggatttgtccgagttttggaaatggcagccggaaataaaaatcatggacgctaatctgcttgcctgtcccgaccatgaaaatctcattgagcagcttatacgaagccgcgcatgggtggatttttcgcaagggctggatattcgccttgtgaacagggataatgtcagcctgttaaatcgggtacggataaaagcggtacattttgcatgggataatcccgacgaggacttaaccgggtatttccaacgttttttggatttgaccgccattaagagcagccgccagcggcgcgtgtatgttcttaccaactacggcagcactcacgaacaggatttataccgcgtgaacaccttgcgggctatgggctttgacccgtatgtgatgatttacgagcgtccaaccgccccgcctgttacccgccatttgcaacggtgggtaaataacaaacggcttttctatgctgtcccccgttttgaagattacattccgggcagaaaggaggtttgaaatggcgtatgtaaccgtcccaaaggacttaacaaaaatcaaaagcaaggtaatgttcaaccttacgaaacgacagctaatttgtttcagcgcggcggtagcaatcggactgccgctgttctttttggtaaaagacagcgttggaacaaccacagcggcattgtgcatggtgcttgccatgctgcctatgtttttgcttgccatgtacgagaaaaacgggcaaccgctggaagtgattattcggcaatttgtggaagtgaagtttcttcgccccaaagagcgaccttatcagaccaacaatttttatgccgcccttgcgcggcaagagcaattagataaggaggtacgggcgattgtcaaaggaaaagaaaaacacccaaaacgaaaagcgtaaactttcccgacaggaaagaaaacagatagatacccttatccgacaggcaaagggcgacgggaagccccatacggcgcaggacagcataccgtttgagcgaatgtataaggacgggatttgccgccttgcaaacgggcggtattccaagtgcattgagtttgaggacatcaactatcagcttgcgcagccggacgacaaaaccgccatttttgaagccctttgcgatatgtataactcgttcgacgcttctatcagcgtgcagctttccctaatcagccgccatgcgaacaaggacgatttcaagaacagtatcacgattgcgccgcagaatgatgacttcgacagtatcagagcagaatacaccgaaatgcttaggacgcagcttgaacgcggaaacaacgggcttatcaagaccaagtttctcacctttaccgttgaagcaaaggacattagatcggcgcgggcgcgtcttgcccgcattgaaacggacaccctcaaccattttaaggtgatcggcgcggcggcgcgggtattggacgggaaacagcgtcttgaagtgctgcatgggattttccacccggacggggaacgctttaactttgcgtgggaatggctacccgcaagcggtctttctgtcaaagactttatcgcgccgtcctctttccgatttggcgacgggcgaatgtttcaaatgggcggcaagtttggcgtagtttcctttttgcagatcgtcgcgccggaactctccgaccgtatgcttgccgacttcatggacgcggaaaacgggattatcgtcaatctgcacattcagagtatcgaccacaacgaagcaatcaagacgattaagcgcaagattaccgaccttgaccgtatgaaaatcgaggaacagaaaaaagcaatccgcagcggctacgacatggatattattccgtccgaccttgccacctacggcggggaagcaaaaaacctactccgcgatttgcagagccgcaacgaaagaatgtttctgcttacgctgcttgtcttaaaccttgcagataccaagcagaaattggataacgaagtatttggagcggcggcaatcgcgcagaaatacaactgcattttgacccgccttgactaccggcaggaacaggggcttatgtcctctatcccgttgggggaaaaccttatccatatccagcgcggcttgacgaccagcagcaccgccgttttcgttccctttacggtgcaagagctgttccaaagcggcgaagcattgtattacggcttaaacgccctttccaacaacatgattttgtgcgaccgaaagaagctgaaaaatcccaacggcttgatactcggcacaccgggcagcggcaaaagtttttctgcaaaacgcgaaatcacaaacgcttttcttatcacgtccgacgacattatcatttgcgaccccgaagccgaatattacccccttgtcggacgtttgaaaggacaggttatcaaggtttcgcagaacagcacgcagtacattaaccctatggatattaacctcaattacagcgagggcgacacgcccatagccttaaagagcgattttatcctttccttttgtgagttgattatgggaggtaaaaacgggctggaagctgtcgaaaagaccttgattgaccgcgctgttatcagcgtgtaccgcaactaccttgccgacccgaagccggagaatatgccgattttgggcgacctctacgacgagatcaagaagcagccggaaaaggaagcgcagcgtatcgcggcggcattggaactctatgtaaacggcagcttgaacatttttaaccacaggacaaacgttgacattcataatcgccttgtctgctttgatattaaggaactcggtacgcagcttaaaaaagtcggtatgcttatcgtccaagaccaagtatggaacagagtaacggtaaaccgcagcgagggcaaggcgacgcggtattacatcgacgaatttcatttactcttgaaagaggaacagaccgcagcatacagcgtcgagatttggaagcgttttaggaagtggggcggtattccgacaggtatcacgcagaacgtcaaagaccttttgacgagcagagaagtttcaaacgtttttgaaaacagcgattttgtctatatgctcaaccaagcacagggcgacagggaaatccttgcaaagcagcttaacatttcgcagcagcaaatgacctatgtaacccattccgacgcgggcgaggggcttattttctacggcaacgtgattttgccctttattgaccgtttcccgcaggatacggaactgtaccgcgtcatgacgaccaaacccggcgaggtgtcggcatgaggatagaaacggacaaaatctattgcggcgacagcttgcaggtgcttcaaaccttgccggaaaacgcagttgattgttgcgtaacgtccccgccctactatgccttgcgggactatggcgcagacgggcagatcggacgggaagcaacgccggaagaatatgtttcccgcattacggcggtattccatgaggtaaagcgggtgcttacgccggaggggacttgttggctgaatatcgcggacacttattgcggcacaggcagcaaagccgaccaccaagaccccaaatatcccaaaggcaggaacgggcagcaagtggcgttcaaccaccgcgcccccggctgtaagcccaaagatttaatcggtattccgtggcttgtagcccttgccttgcggggcgacggttggtatttgcgcagttctatcatttggcacaaaacaaaccccatgccagaaagcacgcgggacaggccgacccgctgctatgaatatgtgtttctgcttaccaagtcaaagaagtattactacaattggcaagcagtagccgagccgatagcccccacaacggcggggcggctgaaaagcggagttagcaaaggaaacaagtataacgttactgttccggggcaaaaccagccgcagaaaatcaaccgcccccgcgaaaagggcgcatacgccgacgagttgatttgtcccgtccgcagccgtcgcaacgtttggcagatcaacaatgtcgcgtatcatggcgggcatttcgcagcatacccgcccaaacttgcggaaacgtgcattttggcgggctgtcccgtgggcgggattgtccttgatccgtttttaggcagcggcaccaccgcagcggcggcaaagcacctttcccgccgctatatcggcattgagttaaaccccgactattgcacccttgcaaaacagcggattggaggtgatgaagattgagcaaggaatggaaagcccccgacaaggtaacgcagaaaatgacccgcgacggggcggttgcggaaaacctcacgacgggcgaaacaacgagtatcagcgaaaggccgcaggaggaaaactattcccaagcccctaccgcagcggcagaaaaggctgttgaccgtatcggcgcagaggttgaacggcaagcggcaaagggcgcagggaaaaaagcccttgacgcggcgcagctaaaaacccatacttcccgcttgcagttttccgaagcggaacgggcaacgccggaattgcagaaatctatccgtaaatccgagaaagcggcagaccgtttagacgcagcgcgggcggctatccccaagcagaccaaaatcaagaaagagcgcgtttttgacgaagcgaaaggcaaggcaaagacgcgcctttcctttgaaaagacggataagcccccaaacggcaagttgcggcataaccccttgtcccgtccggcgcaggagttgaacagcaccgtacatgggaaaatctacgaggttgagaaagaaaatgtcggtgtggaaagcgggcacagggtagaacttgcgggcgagaaagcgggcggtatggcggcgcggacggtaaagcgcggcatacgcagccacaagctgaaaccctaccgggcagcggcggcagccgagagaaaggcggtaaaggcaaacgccgatttcctctatcaaaaggcgctgcacgataaccccgcccttgcgcactcaaacccgatttcccgtttttggcagaagcagcgcattaaaaagcagtatgcaaagacgctgaaagcgggcggcaaagtgaaaaagaccgccgaagccaccgcaaaggcggcgaagaaaaccgcgcaggaaaccaaacgggcgacgttctttgtcgtccggcactggaaaggctgcttgcttgtgggcgggattgcctttatcgtgcttctgcttttcggcggcttgtcctcttgctccctctttggcggcaacagcggcagcggcttaattgcgtcgtcctatctttccgaggacgcggatattacaggcgcggaaagcgcgtatgccgctatggaagccgagttacaagatatgctgaataatatcgagcgcgaataccccggctatgacgaataccgggtgaacgcggacgagatcgagcatgacccctatgtgctaatctctatcctttccgcgctgcatgagggcgtgtttacccttgatgaagcgcaaagcacccttgaaatgctctttgagaaacagtatatcttgaccgttgaggaagaagtacaggtacgataccgcaccgaaacgaggacggacagcgagggcaacgaatatgaggttgaagtaccctacaactattacattctccatgtggatttggaaaacttcaacctttcccatgtccccgtctacatcatgggcgaggaacagctatccatgtacgctatgtatatgtcgtcgctgggaaaccgccccgatttgttcccgtcgtccggctatgtgtctaaatactatgaaaacccgcccgccgattatgaagtacccgccgcgctgcttaattccgatgaacagtttgcgcggctcatagaggaagcggataaatacgtcggctttccctatgtgtggggcggcagcaccccggaaacctcttttgattgcagcggctttgtgagttatgtattgacgaacagcggcctatacaatacgggcagacttggggcgcaagggctttacaacatttcaacccgcgtttccaacccgcagccgggggatttggttttctttacgggtacatacgacacgccgggggtatctcatgtgggtatctacgttggcgaggacggggacggaagccccgtcatgctgcattgtggcgacccgatacaatacgcaaaacttgatacaagctattggcaatcccatttttacgcctatgggcggctacattacaactgactttgaaaggagtttatttctatggcaaacacgaaacttgaccgtatcgaaagggatattgagaaaacgagggcgaaaatccttgaataccaaaaaaggctgaaagaccttgaagcgcagaaaatcgaggaagaaaacgcgcagatcgttcaaatggtgaaagcggtacaccttgacggggcgcagcttgccgcgttcctctccgcttacgccagcggcgaaattgccttgccacagccggacgcagactacaccgacgaacaggaggaaaccgaagatgaagcataaaaaactgttccgcagcgttaccgctttgcttgccgcccttgtactcatgggcggcttttctgttaccgcttttgcgggcggcggtgatgtgagcgacgagccgcctacccccgtaaccgaaaccgagccggaagaaacgacgggcggctatgagccgcagcccttaacgccggagggcaacatgagccttgtggacgacataacgggcgaagcgtccggcgataagcagtttattaccgtcgttacgaaaaacggaaactatttttacatcatcattgaccgcgccgaggacggggaaaataccgtccatttccttaaccaagtggacgaagcggatttaaccgcccttatggaggacgggcagaccgaagcccccgtttgtagctgtactgaaaaatgcgttgccggaagcgtcaacaccgattgtcccgtttgcagcgtcaacatgagcgagtgcgcgggcaaggaagccgagccggagccggaagaaaccgagcagccgccggaagaagaaaaaggcggcggcatgggtattctgcttgtcgtgctgcttgttgccgcagcgggcggcggcgcgttctactactttaagattttgaagcccaaaaaggacgcggcgaaaggcagcagcagccttgacgaccttgattttgacgaggacgacgaggaaacggaagtagtcgaaaccgaacagaccgagcaggaggacgataatctatgaaacttgtaattgcagaaaaaccgagcgtcggggcggcgattgccgccgttatgggcgcgaatgaaaagcgcagcggatattttgagggcggcggctaccttgtgtcgtggtgtatcgggcatttgattagccttgcagacgcggcgacctacaatgaacaattccgtaaatggaagtacgacgatcttcccattgtcccgcaggagtggcagtttattgttgccagcggcaaggagcagcagttttccattctcaaagaccttatgcaccgcagcgacgttaccgagattatcaatgcttgcgacagcgggcgcgagggggaactcattttccgctttgtctatgaacaggcgaattgcaaaaagcccttttcccgcctttggattagcagcatggaagcaagtgcaatccgcgagggcttttcaaatctcaaagacgggcgcggctatgacaacctctatcaatccgcgctttgcagagcaaaggccgattggctcattggcattaacgcgacccgccttttctctatcctctaccataaaacattgaatgtcggcagagtgcaaacgcccacccttgctatgctggtaaaccgcgactatgcaatcagcagctttaagaaagagaaatatcatgtcgtccggctggacgttggcggcgttgccgccctttccgaaaggcaggacgacgaagcggcggcgcggcagatgaaagcggcttgcgagaaatcgcaggccgtttgtacttcccttaaaaaagagaaaaagaccgcagccccgccgaaactgtttgacctcaccgccttgcagcgggaagcaaaccgtttgtatgggtttacggcgaaacagacccttgactatgcgcaagccctttatgaaaaacggcttttgacctatccccgcaccgacagcaaatatatcacttccgatatggagggcagcacaaaggaacttatcaccggcctttgcgctgctctcccctttatgcagggcgtgaagctgcaagccgaccttgcgaggatttgcgacaacagcaaagtaaccgaccatcacgccattttgccgacagcggagtttgtgaaaacgggcttttcttcccttgccgaaagtgagaaaaagctaatgacccttgtgtgcgcaaaactgctttgcgccgttgccgcgccctatgagtatgaagcggttacggcggttttcacttgcggcggctatacctttaccgcaaagggcaggacgacgctttgcgagggttggcgcgagattgaaagactatcccgcgccgcgtccggggaacaggacgaggacgcagagccggaagcggttttacccccgcttgccgaggggcagacctttgacaatccggcagcggagatctccgaacgttacacgcagcccccaaaggcatttaccgaagatacgttactttcggctatggagagtgcgggaaaggaggacacgccggaggacgcggagcgcaaagggttaggcaccaccgcgacgcgggcgggtatcattgaaaaactcattagcgcgggctttgccgagcgcaagggcaaaaagctaatccccacaaaggacgggtataaccttgtcgctattctgcccgacagccttacgtccccgcagcttacggcagaatgggaaacgcgccttaccgggattgcaaagggcagcgacagccccgccgacttcatgcgcgggattgaggaaatgacagcggggcttgtcaagacctattccgcgatttccgaggataaagcgaagctgtttaccccgcagcgggaagcaatcggcacttgcccccgttgcggcgcggcggtttacgagggcaagaaaaacttttactgctccgacagggcttgcagctttgtgatgtggaagaatgaccgcttttttgagcagcgcaaaaaggctttcacaaaggcgattgccgccgcccttttgaaagacggaaaggtaaaaatcaaaggtatgtactcgaccaagacgggaaagacctttgacggagttgtgctgcttgccgacacaggcggcaagtatgtaaacttccgcgtcgagcagaaccgaaaatgataaggcttgatgaaaagcaataccgcgccgtaaagaaaatgacccgcgccgcttgtgcaaacaacgattgcgggaattgtctgctgctggacgacggggaaacttgcgtttgtgtgcagagtatcagctattcgctgctatgccgctatttccgcgaagcggtattacccgccgacaggcagctttgcgaacagatcacccgcagcggggaaaccgatttgaagcgttgcgcggtatgcggcagcacgtttgcggcgggcagcaaccgggcgaaatactgccccgattgcgcggcaaagatacgccgcagacagaaagcccaaagcgagagaaacaggcgtttacggataaaaacaactacatagcaagcacagcaaacgagtacccgtttgcgagaaatgcccgcgcttcccatagagagcgcgggcattttgcttgttgggatagtcccaaacccttatatgaccgagaaaggacgtgatgaaagaatatgccgtattcctcatacgaccatgacaaattagaagccgccgaaaccatgcggatagaacgccggatatattttgaagcaaaggacagggagattgccccttatgcttccttgccgattgcgcagctactttccatgcgcagcgaaagcgcggcggcagaacaggcgatttttgacgaccttaaagaacgcgccgccgcatgggaagaacaggcgggaagaacgcttttgctggataaaacacttgaatatgtgagaacgccgcacgtccagcacaccgctaacgagtggcagaccaccgagcataaccgccatattcgcagcaaccgggtatatcagatgaattaccacatttacgaaaacacccgttacgacagggagaagcagcaaagcgtcccttactcctattctctcacatggggcgtttataccaacagcccgaacaggaacgggcaagcgaagattgccggacaagatagaaaggttttcaccgacaaggcagctatggaaaagtatctgaatgggcgtatcaaagcgtatgaccgcttgtttacggaaatctccccgcctatcccgcaggagtacgccgactatttcaaagtaaacggtatgctcatgccggactacaccatagagggcgaagaacccccgcagcagcaacaggcggcagctatccccgaaaataccgggcaggaaaaggagcgtgaacacatgagcgaacagttttctattatgataggcaaccgcagccgctttgacgcgggcgaccccggcggctattggttggatatgcccgccacaaaggagcagttgcacgaagctatgcggaacgtcggcattaccgccgacaacccgcaggatttttccattcgcggctattccgacgacccggagaaacatattgccttgccttatgaaatggtatgcgccgccgacgtggacgaactcaattttcttgcggcgcggctcgaacagcttgaccccgccgaggttggcaagctgaacgcagctttgcagcagaaaaacgggcttgcaaatattggacaggtaattgacttcacctacaacgtggatttttacgtccatatccccgaagtacataactaccacgatttgggcgactattacttaaatcaatccggcatggtacaaatgcccgaagaatggaaaggcggcattgacctttctacttttggcaggaacgctgccgcgcaggaaaaaggcgcgtttaccgagtacggctatatcgtggaaagcggcgacgagtgggaacggcagtttgaggggcgcgaagtgccggaagaataccgcattatgagttacccgcagccggagcgcggcgaacaggacaaagcctatatggacgcagccgaaacgcagcaagcagacgcacaggccgcagagccgcagcagccccgccccgtcgtccccattatccttacttccgaaaagcccgccgaaaaggtaaaggagatcaccgcgcgtttggaacagggcgtacaggcgatttttgacagcgaccgctacaaagagtttctaaccgctatgtcaaagttccatgattatagtttgaataacactatcctaattgctatgcagggcggcaatttggtaatgggcttccgtcaatgggaaaaggagtttgaccgccatgtaaagaaaggcgagaaaggcattaaaatctttgcccccgcgccctacaaggtgaaaaagctggttgataaaatcgaccccgaaacgagaaagcccatgcttgaccgcgagggaaaagtggtaaaggaagaaaaggaaatcaccgtccccgcctttaaggttataaccgtctttgatatttcgcagaccgagggcaaggagtttcccgacctttccgttaaaccgctgcttgccgatgtggagcagtacgaggattttttcgccgcccttgaaaaagcgtcccccgtcccgattgcatttgagcagatcacaaacggcgcaaatgggtatttcagtttgaccgacaagcgtattgcaatcaaagagggcgtgagtgaattacaggcggtaaagaccgccattcacgaaatcgcccatgcgaagctgcacgacgtagacttaaacgccccgccggagcagcaaaaccgcgttgaccgccatacctgcgaggtagaagcggaaagcgtcgcttatacggtttgccagcatttcggccttgatacttccgattactctttcggctatgtggctggttggagcagcggcaaggaaatgaccgagttaaaagcgtcccttgaaacaatacagaccaccgcaaaggaactcattaccgagattgaggggcattttaccgagttgcagcagcagcggcaagccgagcaggagcagggcgataccttttccatttatcagttaaagcgcggggacgaaacaagggacttgcgctttgagccttatgaccgtctgcaagcggctggacttaccattgaccgggtaaattatgaactcgtctatactgcaccgcttacaaaggatatgacgctgggcgacatttgggaaaggtttaatatcgaccaccccgccgactttaaggggcatagcctttccgtttccgacattgttgtgcttcatcagaacgacgaggacaccgcccactatgtagacagtatcggttttcagcaagtgccggagtttttgcaggagcagcagacccccgtatttgacaagctgccgcccgaacagcagcaagccttgtccgacaccgtacaagacactttgcaaatgctggttgacgcagacaagcggatttatggcgacgttacgggcaagacccttgaagcaatcgcggcgcaaggatattcctacaaggacgggcagcttgaaaagcagcagccggaagcgacccccgacagccttttgacgggtgaaaccgttagaacgccgaggggcaattttcatattaccgatatgagccgtgaacagatcgaagcggcgggctttggttttcatcatgcgtcggaggacgggaagtatctcattatgggaaatggcacacaggcttatgccatagccgccgagcagccgcagcgggataatcccttaaagcacgtcgaggacaccatagagcagaacgacaacaattttgacgggcttatcaataatacgccgcaaacgcccaccgtcgcggattttgagcagcgggcaaaggcgggggaagcgatttccgttaccgaccttgcaaaagcggtaaaagccgagaaacgggaacagccgcagaaaaaaccgtccattttgaagaagctggacgaatacaagaaacaggcggcgcagcagccgaaagataaacagaaagagcataaaaaggatttggaggtttgatagcatgaatacccgctttaccattgaggaagaaaacattgttgcgatctacgccgaggacagccgggaaacaacgcttgaaaatatccttgccgccatgccctacatggacgaggatatgcgccagcttgccgccgcagcggtgaacaagctgcaagccatgacggacagcgagttttccgaaagggagtttatcttgaccgacgaggaatagcccatagagaacaggggcgcggttgccgatttccggcaccgcgcccctgttctttttttgtccttgcgtggacaattagaaagccgtttttgcgggtttgaatatactttatcgtctatgtcgttttcatgcgctggaagccgcagaaacacaggcgttttcagcccttaacattccacttgccaccccatgttttgcgccttatcgctcctgctcccgcgccctgctttgggacgggtaaagaatactatcgacgttctttttgacaacgccgtattcctgcatttgcttcttggcttgccgataatcttcatacaatttggttttcctgtcgtttaagcttctatactccttgcgcagcgcggcgagatcgggcagcttctttatctgcatttcctttaatgcccttgccgcagcttcaaacaggataatttcgctttcatgtccccgcagatacttttccttgtccggcgattttcggtattcatcgtaaatcggttttaactgtcggtatgtggtggtgtgcttgataagcagcgacaaatcagacatacgctgttccacttccttaaccgcctttgccgccgcgtcatgggcggtcataatatccgcgattttgctttcaagttcgctgtaatactcaatcttattttcggttaggaagttcatgcttttagcagcctgtttcagattatggattttcgcccaccgttcatagcccgccgactgttgggctttgatactgttttcaagatcaacgacaagccggatttttttatcttcccgcagcgtttttgttttggcaacatacacgcccttgatacgctcctttatcgcttcttccgtataggccgcgccgagcgtctttgtgcgggtaaaccgttcctgtccggcggcgcggaaagaaatgtatttgccctgtttgatttcatatcccatttcctgcaagcggcgcagcagttcgtcaaaatctttcactcggggaatgaggttatctatcgccgttttcagcttggctttatagcttgtaccttgcttttcggcggtatattccgcatagcttttccctctgtcctgtcccggcacgacgacggatagcccatgctctttacatatcctgtcgctggtgcgccggatatggtaatagctttgtttgttggaatggtactttttgtagtcaacgaagctgaccgagttaaaaatcaagtgattatgcagatggtctttatcgacgtgagttgtcaaaacaaactcatacttgccgcctaataccgccccggcaagttccatgccgattttgtgcgcttcttccggtgtggtttctcccaccgcaaaggattgtatcaagtgccgccctaaatgtgtgccgcgatctccggcagcttcccgcgtccatgcaaactcaatatcggcggtttccagcccgcagccgaaagaggacgcaagcagcttcccgtctgtcttttcgggatttaagatatagtctatcgcagcctttaaggttgatttaatagggtgcgtctttgtaaccgccatatctcgtccaccgcctttttaatgtcctctatatcctgcctgtaaaccgtccccgtcgcattggcgcgttttgcaatttggttgatgttccggctcaccgcttgcagttcccggatatatgcttttgtgtcgcttcggtcaacgacaagaatatacccgtctatcgccattttacggaagtatgccccatactgctttatgggaagctgcttcatcttctcgtcgatcagccgcttttcttcttccgtaacgtaaaacttcatctgtatatttctctttcggttttccatttccgcaccgcctttcggtataagggtttgggattatcccaacaagcattttccgcaaacgggtactcgtttgctgtgcttgctatctactccatacccccaccgaaaggcggtatttgttgcgcgttcctttgattttggacgcaaaaaaagattgcagccgccatgcgctgcaatctcccgatttctcatattgtgaggttaatcctctgctttttcgacttccgttatctcccttgctgttgcggttacaatccgtatgcctttatcgctcataccgtccagcagcgcgtcaagctgccgccgcccggtggatttctccgcattgctgttcgggaagaaaaattgatctaccgaaatatgataccgggttacaaggtcatagaatacctgtaaactcggctgttgtcccttgttctcgatattcgcaaggtagcgcggggaaatatataactcgtcgcttacctttttgcggctctcgccgtattcatttctcgcggcttttatagctgccccgaaagccttaaagtcgtacaatggtacgggtctttttgccattttcattcaccctgttacattttacagttcacctttctttttggatatgtccacacaattcatatcattaggttaaatacttcctgttgtgtattgacagtagactgattttctgataaaataaaatttatgtaaaaggaggcggcgtttatgttgcatagcatgcgtattagataagcattgaaaaaaaggattttcccattttcaacatgggcttttttgtcatgcttattttgcggatgctatacaaaaaactaacgacgtatagatatagtatagacatagtgcaagctatgccttagttttgttgtactgctctgtgcattataaatgcaggtcaatgctcatgttgaggattgacctgcatttttttgtgtaaaaaggacgagtgaaatataatgcttaaaaaatattggataaaatgtccgatttgtaacggaaagacgagagttcaagtatttcataatactgtattaaaagattttcctcttttctgccctaaatgcaaattgacgcatatcattgatgtagaaaaattagagattgtaatcaaaaatacagaaaaacaaacttttattatttagaagaaaggatataaaaatgaaacgtttacctaaatatacgcctgcggaagtacggaatgatccatacggatttacttacaaagaaatgtcggaagttattggcgagaatgaagcaaaagccttatatgaagaattatataagcaattaccacgcaaaaaaaatctatcaatgttggtaaaaaatatttgcaaaagcagtgatactgaaaagtatgtttacgaactgaaagacaacaaatacattgaaacggtttttatcaagcggcgagatggtggaactgtttgcgtgagcacacaagtcggttgtcctgttggttgtattttttgtgagtccgggcgaaatggctttgttcgtaatctaacatcgtcagaaatcgtacaacagattatattgttgcgtcgaaaagtaaaccgtatcgtttttatgggtatgggagagcctttattcaattatgacaacttgataaaagcaatccatattctccgagatagatatgggctcaactttccaaccgacggcattaccatatcaacagttggtccggtcgatcaattaaaaaaattgcgcgaggaacatcttaaaattcagttgacaatatctttacacgcagcaacacaatctgcaagaaatcgtattattcctcacatgcgcatatatgctattgaagatgttgttaagcaagccttatcctattctgaaaggcataatcgcaaaattgtctttgcgtatttgcttttaccgggtataaatgaccggccctcagatgtaagacaacttgcaaaatggtttcggggcaaaaaagttatgattaacgtgttacaatacaacccaacaagcaattcaagaattaaagcaccacagaaacgggaaatagttgcattcaaacatcaattagagcaagcaggacttgaagttactatgagagtttctcatggcagagagattaacgcggcttgtggacagttagctaacacatataataaattcaaaaaaaaatgattaaaagtgccagacgcatagacgcagagccgataacgcattaggtcaaaaaacctatgtgttatcggcttttttatttaatattgcgcaaaagccgctgttccctattatagaatggattgcgggtagtgtattaaagtcgcccttttttaaggatacggcggtatcggggaggtatcgccgtgtccatttttatttactgtaacccgcctaatgctttgcggtcaaaaaaagctatgctccgcaagcgggatattccggctatgaatgtgaactgtcaatacatttagctactgcttacatttcctttgcgcccgtccgcgtcttgcggacgggcgcattttgcttttttcaacttttttctgaaaagcgcactcaagagccatctcccgaacgggtacggagcgaaaggggcagagaggacaagcccttaactcccgtcctctactccacgcgggaaggaggtgaactctatggagctatcttcttccgacaaggaaagaatacaacatcagtacgacgcattagcaaagaaaactttggtcggcgaagcgaaaagccaccgccgcactcttgcgaaacgcgcagcacgcgaagttactttttcggatttgagcgaaagcgaactcgcgcagcttttcacaacggacgaatacgaaagcgattatttccgttttcaagtgtccggctttgatgtactcgtcaaaaatgaactgcttgccgaagcccttaacgctttgcccgaaaggaaacgcgacattatccttttgtcctacttcttggatatgagcgacgcggaaattggcgaactgctgaatgttgtacgcacgacggttttccggcacaggaaatccgcgcttgcgaaaatcaaacagtatttggagggaaaagcagatgatgaataccgttaggaagtctgaaaatctgttgccgttccctgtcatttccgcagcggcaaacggcgacacaaccgccatgtgcgcgatcttgaagcactacgagggttacatagcgaaactttgtacccgcacgctgaaagacgacgcgggcaatacctattcctatgtggacgaggaaatgcgtaacaggctgcaagtgcgccttattacccgcacccttgcttttcatgtaggataatcttttagcccatgcggggagcgtgtcccctttccacgcttcccgttatgggctatttgtcgttccgcaaaagcatatccgctgttgatgtgcttttgcaggccgacaaagcctattgttctttgacaaagaaagcggcctttggtgcgcagcataacaggcaaacgggtacattccgtctgtaccgagccagtcggcgggtacgccatgacagcttttccccataggggaaaagccgagcgagaactaccgcgccgtaaaacaggtttagcagcttgtgggcgacgacatacaaggcggcacaatgatactcccgcgttgaacaccctcaaagtattgcgcggcgcacccataagcatgggccggggtgaaactcccgtgaggttgcagctaacaaccgcccgtttttgccttttgacgaatatagtttatccatacaggaaaaggaggtttttctaatggataaaaaacagacaattacaaccgaacgcaaaatagggaaaatcacctatcttgttcaagcgttgccgagtgaaaaggcaaccgatacaatccataaaaagattgagaaactcattgtaaaggatttgcagaaaaagcccggaaatccgggatttttagcgtccgagtagtgcattaggcggcgggatatggtataatgatagcaacacattatacctgtttattcggctgtcggaaaggaggactaatgttacagtcgaataaaatcaccgccctttactgccgtttaagtcaagaggatatgcaagccggagaaagcggaagcatacagcaccaaaaaatgatacttcaacgctatgcggacgaacaccattttttgaacacaaagttttttgtggacgacggattttccggcgtgagttttgagcgcgaggggctgcaagcgatgttgcaggaagtggaagccggacgagtggcgacggtcattaccaaagacctttcccgtcttggcagaaactatctgaaaacgggcgaactcatagagattgtatttcccgaaaacggagtacgctatatcgcgatcaacgacggagttgacacagcgcgggaggataacgagtttacccccttgcggaactggtttaacgagttttacgcccgcgacacaagcaagaaaatccgcgcagttaaacaggcacaggcgcaaaaaggcgagcgcgtcaacggggaatatccatacggctatatcccagacccgaacaaccgccaccaccttatacccgacccggaaaccgcgccgattgtcaaacaggttttcgctatgtttgttagcggcgtgcgtatgtgcgaaatccaaaaatggcttgcggaaaacaaagtcttgacgattggagcgttgcgctatcagcgtacaggacaggcgcggtatcagcgggcaatgatcgccccctatacttggccggacaaaacgctctatgacatattagcaaggcaggaatatttagggcataccataaccgcgaaaactcacaaggtatcctacaagtcgaaaaagacccggaagaacgaagaagaacaacgctatttcttcccaaacacccatgagccgcttgttgacgaggaaacctttgaacttgcgcaaaagcggattgctacccgccaccgcccgacaaaagcagcggagattgatattttttccggcttgctgttttgcgctggttgcagacataagatgtattaccaacagggcgtaaatatcgagccgcgcaagttttcctattcttgcggcgcatggcgcaacagggcaaggacaggcagcgagtgtacctctcattatatccgcaaaaacgtacttcttgatttagtgctggaagatatgcggcgggttttgcggtatgttaaggaacacgaacaggactttatctgtaaagctaccgagtacggcgacatggaagcgagaaaggcattagcgcagcagcaaaaggaacttttcaaagcacaggcgcgtatgaccgaacttgacacgcttttccgcaagctgtatgaggacaacgcattaggcagactgacagatgaacggtttgtgtttctaacttccggctatgaggacgaaaagaaatcccttgccgcaaggatagacgagttacaacagcagatcgcaaccgttaccgagcgaaaaagggatatatcaaggtttattcagattgtcgggaaatacagcgacatacaggaattgacctatgaaaacgtccatgagtttatcgaccgtattttgatacatgaattagaccgggaaaccaacacccggaaaatcgaaatccattatagctttgtcggacaggttgataccgagcaggagccgacgcaagttgtcaaccatgaccgccgcaacatggtagatgtaaaaagtatcgctatctaaccccagcaaaattcgcgccggaatagccatcgtccacataaaatctggtgttctggaacccattctcatcggcgtacttttgcaggataagtttttggttctggatactgttggagtcgccctccagattatcatctcgggacagacggcaatagagcgccgtgatcttttggtttggctgtaacatattgacctccttcataaaacgccaaaccgattgagagattgcaaccatacaataccctcaatcggtttgtttgtctatgcgaacctgtttttcaggcggaaatattttttgcgtcctgctccaggtcgatgacctgtttcataagatcgaccgtagattgcgttcctccgaaactgaattccgcgaacacaatgtactctctgccgcatacatgctgtcggcggctttttataatcttgccgtccctttcttccactgcggtatcccgcactgccttggcagagggaatatcctcatctccatgcttttcttcactgtaggagcggggacgctcattgtatttgaatttatacgccatatcgttcctttcccctgacgctacagtcaggcaacaaaaatagcagaccgttacatggtctgctgctgtgtttgttctgcctgctgatcttcggtccactgctgttctgtagatgattgctcatcctgtgtgagcaccatggctacgccggccaccagtccgatgacagcgccgatatttttggcttcctgttctgcctggatacggcggtaacgttcctcgacatcttcgttaccatcatccagtaacgctccagttaccgccagaccatacagtccagcgtggagcggcttcatagaaacaggttgcggatgttgctgaccactgtcgctgtgccataccccatccccagcagtgccgccacgatgagcagtaccagtacgatccatttggccactacgatcaggtcgaagtccggaagccagtccagccatttgcaggaatgcttttctttcttcttcccagcctgttccagcagagtggtcatctccgtcaacgatttctggatctccgccatgctgttctgcaccgctgtcaggtctgtgtgtgatctcaggttcggaatatactcccgcattccacgcacttcccacccgatggattctgtcttctgtgtcagcatcgtcagagcctccggcaacggacactggatgacaatgggcgtgatcggtgaactcgactcctgcgctgtcggctgcggtgaaggctcgggccggttcagggccatgagctcgtccatagataatttcttctctgatcctgaattcatattccatgttctcctttagatatttgtcaccgaacagcaaacggtcccgacactgccagccactcggcgtggtataggtgatattctttcgggacttttcccagcgaaccttgtagccctcgctctccatcagcgcaatgaactcctcgcggttggaagcgtggcgcatacagtcattgatgatattcatgagctgcagcttcttgctctgaccacgggccgccgtgtgatactctccgatggtcatagtctttgttttctgcttttgttccctgggttgaaatacaggaagtgaaaactccttgcagaccatgtcgttgcgttgccgcagttcctggagctgctcctttgcgatatgcagtttccgtccggtatcgaaattgaccgagttgatgaggaagtgggaatggatgtgctcacggtctgtgtgggtgcagaccagaacttcgtatccctcatagtactcggccagcttcagcgcggccgcgtgagcggtgaccgggtcgactgcttcgcctttcgggaagctctgtaccatgtgatagaacagtacaccgtccgtcttgtggtagagccgcttggtggtcatgaaatccgcgtagacagattccggctgacagttgatacctgtgaccaactgctgcccctcgaactcggtctttttatcctgcatggtataccgcatcacggcgctcatgcatccggtggtctggccccgcttgtagtttgtgaagctgatgatagccatagcttaccagcgctttcgttcaaggatcatccgaacggcaccacagagttcagagaacgcccgacatacgctttccagatcgatcacggtcactcgtcccatgtgcgccagggtgacgagctggttcagatttctgccgatggacttcagctccttcagcacttctttcaggccgtcgatgaccaccacctgctttcccaggcagcaggcagtgacgtagtcgctcatggacatcccggactgcttcgccaactccttgatggcctcccggtctgtggacgccatgcgggtgctgaatttaacatcttttttcatgtcgtttcctccaaatcgtagataaagtgggcccgggcttctgcccggaattcatgcggaagtcgggcagcggcgttgccgcagaccagacaaacgcgatgctggccacctccaaggaggtgatttccctgcaccgaacacccgcgctccgctttcggccacaaatggccacaaacggcgtttctttttccctgcgggtgtttactcgccatgcccggcaatctcccgcaaatcgccgcacagcgccccaacagggtcaacaggggcgaccacaggtacaccctgggcatcgtcactttcggcacggcgcagctcgatgagccgcttcccgttgctgcggcgcaccataccgaaaattccgattttgcttagcgcgtcaaggctttgcaggatcaggcgggacactttcttaggcgagatacgctccataccgacagggtcgattttttcagacagctctgtgggagtgccgataaatttcgtacggtcgcgcatcagttcagagaccagataggtgatccggtcgcccagtagctccggctgcgttctgctgtctgctaccatctcccacacgttttcaacgttgcgttccagagacaactcccggtattcaatgtcacgaccgatgcaggagagcttcgccttaccgctgccgcgccgatcttccaccagagtaaaactggaatccaccgccccgctgatggctgtcgtaccggagatacggttgaacacatcatcggcagtttcctttcgcagatgatggatcagcaggatggcgatgccgtgcttgtccgccagccacttcagcacggacaggtcccggtagtcattggcgtaggtggcatcgtggacggggcggaccatctgcagcgtatcgacgaggaccagaacagtatccgggtgagctacgaggaagccctccacctgctcctccagcccctgaccgatgggagcgcactccgtacagaaatggacgctgtccggcgcgtcctctgtgatctcgaagaggcggttctggatgcgaaggacggagtcctccaggcagagatagagggtggtgccctgcttcacgctcattccccagaccggttctcccttggccaccgtcaccgccagccacagggccagccaggacttgcccaccttgggtgaacccgccaggatatgcagaccctgagagatcagcgtgtccaccacaaaattgggcggctccagcggacggtccatcagcgtcctaccgtccaccgtgaccagaggacggtccattttgttgctcatagtcagtacctccaattcaaaatatctgaatacaaaaatctcccacctcgaaagaagtgggagtagtattcttttagaggagcagtgcccacaggacttttgagcatccccttgcccctctgctcgtattgtggtggaaaagatggtatcctgataaaaagcatggacagattaaaaatcaagtaggacaaattattgcagaggagggggccagcggaaatggaggggagcatcatattctatacctacggcagcaccttggagctgaacgggcagcagtttgaggcaggcaggctgaccgaagatctgctgaatctatcaccggatgactaccaccccctgcacgaacggatggtgcgcatccgtacccttatggacatctacgagtaagtccgcaagagtgaactttggtggaaactgaatgatgagatggagcagttctgtcaggaacttcgccgctatactgtgttccgcttgctaccggacgattgctatgacgctttcttttcggtgatacgggagatcacaggacagttcagcttgtttcctcccgaggagcacagcctttcagaggatgatcagacaaaacttctcagcgcctcagcggaagaattcttccagagcgatgatggggacagcgatcctgaaatctccttgggactgctggatctgtttcgtcgcagagagggcagcgaggaaaagggcgagttgttttattacgagatgtttcgcctcctgggagcgtgcgaagatacctggagtgcctacaagaaatacatcgaccgctacatgatgtatcttcacgacatccgtgcctttattgccgcatcaccagagtgagcaagccccgagggcgtccaccgaaagcaaaggcgggtgggacccatgaccaatgaggaattggtccgccgatattacggcggtgatgagcgcgcgctggaggagttgtaccgcaggaatctcgggctgatccggcgcatcgcccgggagactgccagagagttcaactgtctgcatatggacagggaaagaccgggagagttgtccggctatacgaaaacgattctggaggatctttgcggcgagggtgcgttggaatttctgacacgggtccagagcagagaatacgataagagccgtgctgtgcttgccacctacctgtacccacatctgaaaggccggatgacccgttggctggagcaacatatcggaaatctttctctgagcaagcacgagatggatgctgtccggcaggcacaaaggctatatcattcaggtcagttcagcatcgaagagatcgcggagaaaatggatgtccttctggaacaggctgtcaagcacatccgttacaacacccattttgttggtgtcaatgatcttatccctgggagctatgacggtgatccctttgagcggctgatgcctgggaatctctctgtttctgcggagcaggtcgtgtatcgaaaagtctgcattgagctgctgcaggaactatttgatgctctcccgaagaaggacagggacatcctcggaaaattctacggcgtattcggatttgaaaaaacttcgctgaaggaaatcggcatgtaccacatgatgaaggagtccgccgtggaaaaggcaaaggagcgtgctgtcacaaagctgaaaaaagcctatccgggtagcaggctgcagatctggaggaatgttcatcgtatgatacgcagaccgatcctgccagcgaaggatgacagagcactgcggcgcagcttcacgacttcgaccctacgaaatcaggagtctggaagatcgtagtttcgatacagtctggtgagaattttgcgcagacaggagaccgcaacagtcccctttaggacatgtttaggaaaaatcaagagtcatactcgcttttttatacgttccgtgctataatgcagaaaaacacgaaaggccggcaactatggctacacatattttagtcgtcgatgacgagactgcgatcgcagatctggtggaggtctatctgaaaaacgaaggcttcaccatccacaaattctataatgcctccgacgccctggcttgtgtgcggacgacacgcttgaatctggcggtgctggatgtgatgctgccggacatggacggctttaccctctgccagcgcatccgggaggaccacctgttccccatcatcatgctcaccgcaaaggtggaggatatggacaagatcatggggctgaccttgggagcggacgactacatcaccaagcccttcaatcctctggaactggtggcccgggtcaagactcagctgcgccgctacacccggtacaaccccagggaggggacagtccaggaggtcaccgaatacgacttccgaggccttcagatctccaaggccactcacaagtgcgtcctgttcagcgaggaactggccctgacgcccttggaattctccattctctggtatctatgtgagcaccgggggaatgtggtgtccagcgaggaactgtttgaacatgtttggggcgaggcgtttatggacagcaacaacaccgtcatgagtcacatcgcccggctacgggaaaagatgcacgagcccagccgaaagcccaaattcatcaagaccgtttggggggtggggtacaccattgagtaagaaaggaaatacccgcagccgccggagatctttgcgcatctggggcggctacctgctggtcctcatggcttgggtggtcgcagtgatggccttggcatttctgggcttcatcatctgcgccagcatcacctggcagccctcgccgctctacgacttcctgaattgggttcgagactacatcgttctggtctgcatcgtcacagtgctggcgggctgggtggtcatcagcttctattttatctccaagcccatcaagcagctggacgtggtggccaatgcggcagagcaattatcccgccccagtgaggagcccatccagctgccggattccctggaggacatctccatccagctgaatctggcccgggagcaggctctccgggacgcccgggcagcccgggaggcagaacagcggaaaaacgacctaatcgtctatctggcccacgacctgaaaacgcccctgaccagcgtcatcggctacctgaccctcctgcgggatgagcctcagatctccccggagatccgggccaggtacaccggcatcgccctggagaaggcggagcggctggaggacctcatcaacgagttcttcgacatcacccgcttcaacctctctcgcctggagctggagcggcagagcgtggacctgacgcggatgctggagcaggtcgccagcgaattccgccccattttcgcagaatcggggctgtcatgcagcctggatctgccgcccaagctgcactattcctgtgacccggataagctggcaagggtctttgataatctcctgcgcaacgcgtcttattatagcctgccggacagcacggtggaaattgccggacggatagaggccgggaaaatcgtactcaccttctccaatgcgggaaagaacatcccccaggagaaattggaccggatctttgaacagttcttccgcctggacagctcccgcgccacccggacaggtggtgcgggccttggcttagccatcgccaaggagatcgtggagctccacggcgggaccattcgggcggacagcactgaggatcggatcaccttcaccatctgtcttccgtcagaccattcagaagcgccgtaagaaaatcacaagaatttcgcagaaaacttgcaaggcatccgttggtagatagacaagtatgaaacgcctggttctggtaccatttcagtatcagaaccaggcgctttattttgattaggaggtcttatcccatgaaaaccattctcgttctcttcggcggatgctccacggagtacgaagtttctctccattccgcctatgcggtgctgtcccacatggaccccgcccgctatactcctttggctgtgggcatcacacgggaggggcagtggctctgctataccggcgacctctcccggctggaggacggtacttggcagcaggcggcagactgtatcccctgcaccccactggtggaacgggaggcccacgctttactactgctggacggctccggccgccgtctcctctttgacgcggtattcccagtcctccacggcaagaacggcgaggacggtacggtacagggactctttgaactggccggggtcccggtcatcggctgcgggacattgtccagcgccttgtgcatggacaaggaccgggcccaccagctggcggccctggccggcatccgggtcccccggagccacgtctttcattccagcgatgatttcagccggatcgcccaggcagcggaggaactgggatacccggtgtttgtcaagccggtccgggccggttcctccttcggtatcaccaaagtctccgggccggaagagctgcccgccgccatggaggaggcattccgccacgacagcgccgtgatcctggaggagacgatccccggctttgaggtgggctgcgcggtcatgggcaacgaggaactgaccgtgggtctggtggacgagattgcgctgtcggagggctttttcaactatgaggagaagtacaccttaaagacctccgccatccactgtcccgcccgcatcccgccggagaaggcggcagagatccaggcagcggcaaaaaccatttaccgtgccctggactgccgggtattcgcccgggtggatctgttcctcaccccggatggggagatcgtcttcaatgaggtcaacaccatccccggcttcaccgctcacagccgctaccccagcatgatgcagggcatcggcatttcctttggggagctggtgacccgcctgatcgagttgggggtggcgggatgagaaccgtgtcgattccccgggagcagatttttcaggggccgctggtcctggtcaaccggtcgcatcccctgcatgaaaaagagcgatctgcgctgacctcggtggacccgcaccaccccgacattcttcttgaaagccgggcacggcagctactgtctgcctgtatccaaaaggcggggggacagcgggagatcgtgccggtgtccggctggcggagccagcaggaacagcagcggatctgggacgactccatggcggagcatggggagacatttacccgccagtatgtggcccttccaggatgcagtgagcatcagaccggcctcgccatcgacctgggaaaggctgccggatacatcgacttcatccggcctgcctttccctatgacggcgtctgcggaagatttaggcgtctggcggcccggtacggctttatcgaacgctaccagcggggcaaggaggaagtcaccgggatctcggctgagccgtggcacttccgctatgtgggggcgccccacgcccagctgatggaaaccaacgggctgtgtctggaggagtaccgggactttttgcggcaaggtccccggagcgtcgctctggaaaacggccgcatggcccaggtgttctatgtgcccgccgccggagccgtcacagaggtggaagtgccggagggctgctgccagatatccggcgacaatgtggagggatttatcctgacatggtggggggatacccatgagaacggctaagaaaaccgtcccgactttggacctctttcgtctggcggcagtcctgctggtggtgatgaaccacacctcgcccctggcggatgtgtctgccatggctgatttctggcttacccgggtactggcccgggtggcagtcccattctttctgatgaccactgggtactttctgagccggaatcactgggctggtgtggggcggcagctgaaaaagctctgcctgctctacggcgtctgcatccttttgtatctgccagtgaatctctatgccggcagcttcaccggtccggcggatgttttgcggaaactgctggtggacggcaccttctaccacctgtggtatttcccggcgaccattctgggcatcgtcatcgcccggtggctcagccggctgggcctgcgggtggctctgcctgtggcggcgctactctatctcatcggtctgggcggggacagttactatggactggtttcccagatcccgctgcttcggaccctttacaacggcatttttacactgtgcggctatacccgcaatggcctgttcttcgcgccactgttccttctgcttggggccgccggaaggcggtggaaccaaaagctgtctctggcgggcttcttcctctctctggcagccatgagcgccgaggggctgtggctccatcgcatggatgtccagcgccacgacagcatgtacctcgccctccccctgtgcatagtatgccttttttctctgctgctgggcggaaacaagggcgagtccaggaaagtccgggaattttccacagccatgtatgtgctccatcccctctgcatcgtactggtccggggagcggcaaaactactgggactgggagaaatgctcattgaaaacagtgttctccattttattgtggtgctggcgctcagtgcgctgctctccgccccttgcctgctgaggcttcaaaagaagcccagccccaccgctcgggcctggcgggaggtggatctggcggcccttgggcacaacgcccaggtgctgcggaacacattggccccggggacagagctgatggcggtggtaaaggcggaggcctatggtcacggcggggcagtgaccgcccgcaccttacagcgagcgggcgtccgggcctttgccgtggcctgcctggccgaggggattgctctgcgaaaggcgggcatccgggggacgatcttgatcttaggttatacctccccggaggaagctccgctcttgacacgatggcatctgacccagacggtggcggatattgaccacgggcgggccttggcagccagagggcggcgtgtccatgtccatctggccctggacacggggatgcaccggctgggcatcctggcggaaaaccggaaggagatcctggaggcattccggcttccaaacctggtagtggacggtgtcttttctcatctatacgtctcggacagcctggaagccgaagatgttgcctacacccaggagcagctgaccttgttctatgatacggtgacctggctccgaactgccggatatgatcccggcaaagttcatatccagtccagctatggactttggaacctcccagctcagccctgtgactatgtccgggctggaatcgcactctatggagttcgaagcgatgatgcgcctgttcagcgaagccttgacctgcggccggttctgtctctccgggccagagtggccagtatccgcactgtgcaagccggagagagcgccgggtacgggcgggtctttcaggcagagcaagaaaccaaactggcggtggtcaccatcggctacgcggacggtctgccccggaatctgcctcagcggggcggccaggtgctgattcagggccggcgttgtcctatggtggggcggatgtgcatggaccagttgctggtggacgtcagcgatctttcggaggtcgctcctggcgatacagtgactattatcggccgggatggcggtcaggtgattcgggcagaggaactggctgcatgctgtgggacgattaccaacgaactgctctcccggttaggcatgcggttacccattgtttctggttaaagagcggtagggaattttacaaagattccggttcggatttcaacatgaatatacctttaaacagaaatagccaccaaccacgatgaaatggttgatggctattcccgtttggtcgacaccaagagattctctcaatcggtttaatctggtgttttcaagatgtccttatgaggagtcgcccttgcggtctcttttttattacattcttccgctgatccgcagtcggttcagggcgcgggccaggttgccctgggccagctggtactcagccatgctgcgcttctgccgcagctcctcctccgcctcccggcgggcccggagcgcgcggttcacgtcgatatcctccggccactccgccgcgtccagcagcagaagcacccggtccccgtcgatcttgaacagccccggcgccaccgccgcccggcggtgctcgccgtcctccgtctcgaaccgcagctcgccggcgcacaccgcgcccacagcgttgctgtggccggccagcacaccgtactcgccgtccgtcacggggatgaccgccgacacgcacttgccctgaaagaagggcacgctggccgccagcacgtccagttggaacacggccgccatcacataccgcctttcttcagctcctcggccttgcgcttcacgtcgtcaatggtgcccgcgttgaaaaacgccgcctcgggatactcgtccatcgcgccggacaatatctccttaaagccccgcagcgtctcgtgcagcggcacgaatacaccgggtgcgccgctgaacttctccgccacatagaagggctgggacaggaaccgctggatacggcgcgcccgcgccacggtcttcttgtcctcatcgctgagctcttccatacccagaatggcgatgatatcctgcagctcccggtacttctgcagcgtggactgcaccgcccgggcgatgttgtagtgctcctcgcccacgatgtcgggctccagaatgcgggaggtggactccagcgggtccacagcgggatagatgccctgctccgcgatcttacggctcagcaccgtggtagcgtccagatgggagaacgtggtggccggcgccgggtcggtcaggtcgtccgcgggcacatacaccgcctgcacagaggtaacagacccgttcttggtggacgtgatgcgctcctgcagtgcgcccatctcccccgccagcgtgggctgatagcccacggcggagggcatgcgtcccagcagcgtggaaacctcgctacccgcctggacaaaacggaaaatattgtcgataaacagcagcacgtccttgtgctcctggtcgcggaagtactccgccatggtcaggcccgacagcgccacgcgcatacgcacgccgggggactcgttcatctgcccgaaaaccagcgctgtcttgtcggacacgccggactcccgcatctcgccccacaggtcgttgccctcgcggctgcgctcgcccacgccggtgaagatagagtagccgccgtgctccatagccacgttgtggatcagctcctggatcagcacggtcttgcccacaccggcgccgccgaacagaccgatcttaccgcccttgggatacggctcgatcaggtcgatgaccttgatgcccgtctccagaatatccgcggcgggcatctgctcggcgaaggtcggcgcggcgcggtggatctcccaccggggcgcgctctcgtccaccggcggttcgccgtcgatgggatcgcccagcacgttgaacatacgtcccagcgtcttctcacccaccggcacccggataccgtgtcctgtggcggtgacggtcagcccgcgggcaagcccgtcgctgcctgccatcatcacgcagcgtacggtcttgttctccaggtgctgctccacctccatggtatagcgctgaccgttcgcctccacggtcaaggcctcattgatggcgggcaggctcccctccgggaagcgcacgtcgataacagggccggaaatgcccgtgatactaccttgtttcattgaggtcagccctccttttctttcttgctgcgctgggcgcgctcaccggcggagacctcggtgatctcctgggtgatggcggcctggcgcgcccggttgtactggacggacaggtccttcagcagctcctccgcgttctgatccgccgcgttcatggcggtcatgcgggcgctctgctcactgcagaagctatccaccagcgcgctgtaaatatagccggtcaggcagctgcgggcggcgttgtccagcaccgcccctgcggacggcacgaactcatacgccttatccccggcggcagccgccgcggcggcgtgaaagtgctcccggtgcatcggcaggatcctctcctgccgcaccacagcctccaggccgttcttcatgtcggtatagatgacccataccgcgctgatcttccccgcgtcaaaccgttccagcagcagctccgcgatgtgccgcgcccggtccagcgtagggttctgcgccgtgtagtgaaagctctcctcgatggcgatccctcgctggctgaaccagcgccggccatactcgcccaccacatacagcaccgcgtcgccctgggcggtcagcagctgctgcgcctgccgtatggcgttctggttatacgcgccggccagtcccttgtccgccgtgatcagcaggcacgccggcacgccgggcaggggcttggcgttgggatccaccggatccacataccggctctctatggtgctgtccgcgttgaacacgcggccgatctccgtctgcaatgcctggaaataaggccgtgtgttgtccagatcctgtttggccttccgcagcttcgcctgggagatcagatacatggcgtgggtgatcttctgggtctgccgtacgcctccgatgcgccggcggatctcactggtgctggccatgcgctcaccgcccgcctgcgcgcttgaatttctccagcgccgtctttgcaaagtcgttgatctggccccgcagctcgtcgtccagcgccgcgccctgctccagctggagcatcaggctctgccgctgcgcggcgaactcgcccagcaggaagtcccgcagggcgcacacctgggccaccggcacctgctgatagaggtgcgccatggccgtcaccagcgtgacgatctgctgtccctggctcagcggagcactgcgcccctgccgcaggatatacatcaggctctggccgtaggccagctggctcttcgtctcctcgtccaggtcgctggagaactgggtgaacacctccatctcgcggtactgcgccagatccaggcgcagggtgcccacggccttcttcatagccttggtctgggccgcgccgcctacgcgggacacggacagacccacgttcaccgccggccggtggccggagaagaacagactgctctccagaaagatctgaccgtcggtgatggagatgatgtttgtggggatataggccgacacgtcgcccgcctgggtctccacgatgggcagggcggtcatgctgccgccgccgcgctcgtcgctgagccgcgccgcgcgctccagcagacgggagtgcagatagaacacgtcgccgggatacgcctcgcgtccgggggaccgccccagcagcaggctcagcgcacggtaagcgatggcgtgcttgctcagatcgtcgtacacgatcagcacgtccttgcccttgttcatgaaatattcgccgatggccgcgccggcatagggcgcgatgtactgcatggacgcggactcgcccgcgccggcgcacacaacgatggtgtagcgcatggcgtcgtgcttccgcagcagctcggcgatctgcgccacggagctggccttctggccgatggccacgtagatgcagatcatatccttccccttctggttcaggatggtgtcgatggcgatagcggtcttgccggtctggcggtcgccgatgatcagctcacgctggccccgaccaatggggaacatggagtcgatggacagaatgcccgtctgcatgggagtgttcaccggctggcggtcaataatgccgggtgccgggctctcgatcatgcggtattcatccacggggatgtctccgccgccgtcgatgggcgcgcccagggcgtccaccacgcggccgatcatgccgtcggacacgccgataccggcggtctttccggtgcggtacaccgccgtgccctcgctgacctcctccacgcggccgaacaggatgcagccgatacggccggagcgcagctcctgcaccataccccggatgccgccttcaaacagcaggatctcgccgtaggtggcgccctccaggccctccacataggcgataccgtccgccacggtgagcacgctgcccacctcgcgggcgcatacctccggcacccagctcttcaccgcgtcccggatcagggggatgacggagccctcactcttcagtccggtcagccgttccttcagctgctccagccggccctccgccgtccagtcgatgacctcgctgcccagctcaatgcggaatccgccctgtgcggtgcggtcctcctgccagaccagctcgacggccttgccgtactttttcgacagcacatcctccagcttctctttctgcgcgctgtccggcggacaagcgctgagcagtttcgccgtcaggcgtgcatcagtgttcattctgttcctccttcgcggcattcacgaaggcgtcataggcctgggccgtctgggcggccatcagcttctccatggcgtcctcggcaatagccaccgcctcgcggttggcctcggccacgatcttctggcgctcgctctcggcggcgtccttggcatcggacaggatcttgtccgcctgcgccttggccgcgtcgcgctgctgctgggcaaaggcctccgcctccttggcggcggcggcacgcttctcctccagcacggcgtcaaagtccgcctcccgctgggccatggcggccttcagcgcctcggtgtccttctcccgggccacggcggcggcttccatatccgcatagtgcttctcccgcttttccataaagctcttcaccggcttgaacagcagcagatacagaccgcccaccaggatggagaagttgaagaagtgcagcaatatctgctgccaatcaatattcagagggatattcatagcgtctctccccgtttcttacagcacgaagatgatcaggatgaccaccagcagggcatagatgatagccgtttccaggaacaccagacccagcatcatggtggtgcggatcttaccctcggcctccggctgacgggcgataccctcggcggacttggcgatagccatacccataccgatggcgccgccggcggcggccacaccgatggcaacaccggaagcgatggccttggcgctcacgccgctgtcggccgcttcctcggtctgggcggcggtgccgtcggcaggtgcggtatcggcgaacgcggtcacggtgagcagggcggtcagtgccagcaccaggcacagcagcagggcaaaggccttcttattgaacagctttttcatggtttctctttcctccgtcagttatttacagtttcagctttgatttttttgtttttcttgggcttgggtgcgtgcttttccgtagtctctccgtagaacatggaggtcagcgtggtcagcacgtaggcctggatcagcgcgtggagcagcgtgaacagcacgcccaccaccaccggcacaacgaagctcagggacacatagtagtacaccagctccgtcaccagcaggccgctgagcagcgcgccgaacatacggaagctcatggagatgggcagggagaaatccttgagggccttgcccgcgccctttgcgccgttggccacgatgccgcccaccaggatcacgccgtaggacaggcagcccagggagatggccgcgttcacgtccgacagcggggccggcagcgcgatggtgtgtccgcccgtggtgatggcctggaagccgaacagctcaaacagcgttcccacgaagatgtacacgccggcgccgaagatgtatgcgcccaggaacttgttgcgatgcgggctgttgcccttggccatcccgtcgaacagccctaccgccgtctccagcgccatctgcagctttcccggtaccatcttgaaccgagggatgacgaacacccgcagcagtatcgccgccagcagcagtgcgcccaccaccaccagcgaggatatgtacgccgggttcacgtccttcagcccgaacaggctgatgcggttcgtcccgtggagcactgcgtcacgcatggcctcctgcaccgactccgacttgccgtgtccggggacaagcagagaaccggccaggaacgccgcggtgatcagcagccacaccacgatgaacctgattttcttctttttttccattcgtctttcaccttttacatccggtaaaatttttgtgccgcgtcgcgtcgtaaaacggcagaagcggcacggcgccgacctcacccttccgatttcttgtcgaaatcttaacgtgcggtaccagcatcttgacacttcttttttattataataaaaaccctgtgctaacacaagctttttttcgccgcattgcctccaacattccgcagaaaccgtcacattttttatcatccccccttatctgacagtcccaccgtcttttcccccgctctgccgccccggccgccccgcaaaaagcagagcgccccgcagcagcggggcgctctgtcgtcgttatttcccgtttcgtttcttggcgaaggccgccttcttccgtggcgacatcttccccttctgcgccagcggcttcgccgtgggtgtcccccgccgcccccggttgccggaggcctcctttttccgccgcggctgtctctccggcctctccggcttctccggcttgaccggcggctgaccgtagggctcccctttccgcggccggatcaggcacttcttctcgtacccgatcaggtctgtccgccccgtctcctccagggcctccaccaccagcgcccgcttctccggccgcgaccactgcaaaagcgcccgctgcatggccttctccttgggatccctggccacatacacctccgacatatcccgcgggtcgatgcccgtgtaatacatacaggtggacagcgttcccggcgtgggatagaaatcctgcacctgctccggcgtcctgccgtttttgtgcaggaactccgccagctccaccgcgtcgctgagggtacaccccgggtggctggacatcagatacggcaccagatactgctccgtgccaccctcctcgttcagcttctggtactgccgccagaacttcagaaacacgtcaaagtgcggctttcccatgtagtccagcaccgaactgacgcagtgctccggcgccaccttcagctgtcccgagatatggtacttcaccagttccttaaagaacgacctgtccttgtcctgcagcatatagtcgtaccggatgccgctccgcacgaacacccgcttgatccccggtatctcccgcatccgccgcagcagctccgtgtactccgagtggtccgcgtccagattggggcacggctccggtgccaggcagctgcggttcttgcacataccgcaccgcttctgcttctggcagctggtgtggcggaagttggcgcttggcccgcccacgtcgtggatgtaccccttgaaccccggctcgcgggtcagcagctccgcctcctccagcaccgactcgatggaccggctggtgaccatccgcccctggtggaaggccagcgcacagaagttgcacccgccgaagcatccccggttgtgggtgatggaaaactgtacctcctcgatggccggtatgccgttcttgtacatgggatgcacctgccgggtgtagggcagggcgtacagggcgtccagctcctcccgccgcagcggccgcgccggcgggttcaccaccagataccgcccctcgcagggctgcaccaccgcgcagccccggatgggatcatgctcgtcgtattcgatcttcgtcgcccgggcataggccgccttgtccgcgcataccgcctcataccccggcgcgtccgcccggtggaacttcagctcatccacctggtcggtgatgtacgccgtccccggtatatccgtcagctccgacggcgatgccttccgcgccagacgccgggcgatctccgccgtggcgctctcccccatgccgtacaccagcaggtccgccggcgcgtcgaacagtatgctccgccgcaccttgtcgtcccagtagtcgtagtgggcgaaccgccgcagcgacgcctccagcccgccgataacgatgggcacgtccggccacgcctcccgcacccggttggcgtacacgatggtgggccggtcaggccgcttgcccatctctccgccctcgctgtacaggtcgcgggtccgccgccgcttggccaccgtgtagtgggccaccatcgagtccaggttccccccgccgatcagcaccccgtaccggggcttgcccatggcccggaagtcctccgccgagtgccagtccggctggggcagtatcgccacccgatagcccctgctctccagcagccgagcgatcagcgtggtgccgaagctggggtggtcgatatacccgtccgccgtcaccaccagaaagtcatagtaataccagccccggtcgatcatctcctcccggctcaccggcagaaattccattcccttttccatgtgttttcactcccaacttccatcctatcttcgtcccccctcccgtccgcaggcgtcagccttccccctgatgaggtcacagggagacgggtgcccaggccgcacaagcccaagccttcccctcgcagagtccgcggtgttgagtggcgcaccccctcaagccttcccccttgatgggtccgcggtattgaatgacacgccggtggcgtgtcagacccgcggaccgaccgacccgcagggagacaggtggcacggcgaagccgtggcagatgaggcgtcgccgcgcagcggcgtaagcgcatgatttgtctccgccggggatagtttcgcgccccggcgcgagctacttttgtctgcggtgacaaaagtagccaaaagcaccgcttagacctgcggtctaagaacccctcgcgcgctatactcagttgcgatttcctgcgtattctcgcggacatagcctttcatcaccgttgtcggtcaaaaggactgcgtgtacgctcaccggcgcggaggctgacgcggccgcttgccccagccacggtaggtgtttttcgctcttaccgccgcaccccaagccttccccctggaggtccgcagtgtcgaatgacacgccggtggcgtgtcagacccgcgaaccgaccgacccgcagggagacaggtgcccccgaagggggcggatgaggcgtcgccgcgcagcggcgtaaagccccccgtccccgccgcagcgggctatttcgcgccccggcgcgagcgtttcttttgtctccgacggggatagtttcgcgccccggcgcgagcgtttcttttgtctccgacggccccatttcttccaacagcggaagaaatgggggaaagaacgccggcagaaactgcgtttctgcacttcctcagcgcgctacggtcggctgtgatttcccgcatcttctcgcgggcataacctttcatcaccgttgtcagtcaaaaggactgcgtgtacactcaccggcgcggaggctgacgcagccgcttgcttcagccacggcaggcgtttttcgctcctaccgccatcccccaaagccttccccttgaggggtccgcggagttgaatgacacgccggtggcgtgtcagatccgcgaaccgaccgacccgcaaggagacaggtacccccatatcccggcggcgttagccgccacctacccattgcggtgcttcgcgccgcaatgggcgcgatttgataatcgccattcgatcagcgcaccagcccctatcctcgctgttgtcagcggcagcggcgcaagaggtacaagcgatcccccgaaccgacaacgtcccccaccgcaccaattccgcgagatcagcaccgccaaatttgcacttgccctccccgcgccaagggatccttaaaccgtaggtttgagtggttttctttggtaactttctttttacaaaaaaagaaagttactcgtgccggggcacgaaattccccatcccgcgcccgcaggcgcaacacctgctcgccgccggggcggcgaaacccgccccgcgccaagggcccttagaccgtaggtctaagtggttttctttggtaactttctttttacaaaaaaagaaagttactcgtgccggagcacgaaacgccccatcccgcgcccgcaggcgcagcacctgcttgtccccgcgccaaggaagtcttgaaacgtagtttcaagcggctttctttggcagctttctttcaacgttgaaagaaagctgctcgcgccagggggcggcgaaaccctccccccgccgcgaagtattgacgcaaaatcccccgccgttactgccacgccgccggtaccggcggcataatacgccgcacatctttctccatggtatcccccgccgtgggcacaaagcccagccgcgcgaagaacagccgcagccccttgtccgggcagtccacccgcaggatatccctcccccgccgcaggcaggcgtcaacagcctgccccatgggcgggatacccaggcccttccctcgccattgcggagtcaggccgtaccagctcagccgcagggcgtccccctcgtcggacaggctgaaggctccgatcagcgcctcgccgtaccacacgccggtagcctcgcccccggcgggcatacccagcgccgcccgcttctcctccggaagcgggccgtagccctcgccggactccaccatgttcttctccttccaccagctctgcctggcaaaggtagacagtccccgttccgtcagatggctgttgtcgtcccggtataccacccggaacgtcccgttctcccattccagcagcgacacggcggtgttgtccccgtggggcgtctgccccacctccgccagcgtctgcccctgcaaaacgcccagcacggtccgcagcgccatcccatgggaaaataccgctgcggtgccgccctcatgggcccgggccacgcgctccagcgccgggataaaccggtccaccacctgctgtgccgtctcggcccccggcacacgccacaggtcggcccgccggttgaagttgtacatctcctccgggtatttcacgttcagctcatgccaggtgtggtcctcccactcccccatgcagatctcccggaacgccggctccagatgcagcggcagggccttgggcagccagatggcccgtgcggtgatctgcgtccggtacaggtcgctgctgtacaccgcgtcgatgtccaccttccggaacctctcccgcagagcgtcgatctgctgatacccccggtagttggtgatcagcccgttgcagtggccgtgtgcaacgcggtacaggtttccctccgcctccgcgtggcggatcagatacagccgcgtcataccaccgtcacccactgcttccacgcgcggaccgcctcctcgaccgccgccgccggctccgccgcgtactgcaaagcactgtctgtcgccagcgccccgtgacccatatcgtcaaaggccggcagcgcattctccccgtcgcagtcctccagcagcaaaaacgcccccggacatactctccgcacgtccctcacatccagactgtaccccgtggacacagccagcgccgcaccccggcgtgccatctgctccgccacggacagccacagcgcccggtcgccggccaccagactctgcacctgtccgccagtccgtaccgccgcgatgggcagcatctccccagcctccaggcacccgcttccgccgtaggggcacaccgtcacggcgtccgccctgtacccggcccagcacttcggctccgcggtgttcatatccagtatcacatacagttccttggcatgggccgcgctgacaaggttcgccagcacgtccgcccccaccatcccgtgacgcagatacgctccgccccgcagcaccaccgcgggcagctttcccgccgccgcgtccagcagcgtcgtgccgtgataccgcagcgcctccgcctgggccatgggcgtgtcgccgaacatatcgataaagttcttcacaaacttcccattcagcttctccgcctccggcgccagcgtcagcgccaacggtgtttttttctcgcggatacgccgctgcaattccaaatcaaacatcatgttctccttttttacctttgcgctcccatatacacgcgctaagagcacgcaaaatgacaaatggcatataaatagtgtatagataacctataaacaacatctacgcaagtgtctgacatcgtctcatggtattataccaattccgcccccgcttggcaagaaacaccgccgtctttttcgcattttttcacctctgccgggcatactgtacacaggccgataaaggataaaaatgcaacgaaaaagaggtgaacacgatgaaaacgtgtactttcctcaagggaatggtcgccggcatggctgtcggcgtcctgctggacaacgcccttcgtccctcgcccaagttccgcaagacccaggcgggcaaaaccctccaccgcctgacctgcgcccttgacgacgccgtggacgaggtctgctccaagctgcaataatcgcggtatcgcatccgggcggtgtatggttatgtaaaccatacaccgccctataatcagcagatttccattgttcaaaattacacattatgttaacttagatatttgctgtcaattccacaactcaccccgaaaattccatcttgacaaacctggtatttttggtataatagtccatgctgtttgtcagcgaatcgaatatgcagtggtatcgaagaggtcataacgagcacgactggaaatcgtgttgtcgtcaaaagcggcacgagggttcgaatccctcccactgcgccagtgaaaagccctgtaaccatgccggttacagggcttttcttctgcgccagaacggggatttgaccataattttgaccacaaacacgccggtgcttactgaccgcgcgggctgtcactcctccaccagcggcggctcaaagctctcaatagcactacgaagcttggcgtgacggatgacaaaatgtatggcgggtgatttttccttggacaccatggcccaccgcccctcgtgcatgacgatctgcaaattgcggaaggtgctgtcggcggtcagttccaggcggcagcgcgggtgcactgccgcgaactgttctgtctgaccgatgtgttccagatactcctgataggtatacggtatatcacgttcatagaacgatcctgacaggggcagggacatcgggtatcgttcaaaggcttcctctgtcagtcggggcagagccaacaccatttcattgtcccgcaggatggtttcggcctgctcccggcggcttttggcgtgggccaggatacgctcctgatccggcgcaggcacatcgtgtctttgcagcaccgccgccaaaaacgcggggtccgcggtatacagcggcggcgccgataggacacaccgccgtcggccgggggtgcggctgtcggccaatagaaacgcgttcagccgggaagcgccgtcggcacggtatatctccatcagcggcttggcgttctccagcagagcgtcggcccgacggcggtaataggccacctctgcgcggctgttggtcaggtaataccgcccctcgctatggtggccggacacagcctcgccggtcagtgcggcggtgccggatacccgcaggaaatgcaggaacacaccgccctgtggcgctttgaagtaatacggctcgatctggccggtcatatacatggggatgaagctctccagtcccagcatcatctccggcagattgcggtcaatgttgtggatgatctgcagccgcagaccttttttcagcagcagcgccatgccgaacatccacttcttggggaactccgggtcctgggccatctccgtcatgggcatatcgctgtacataaacaccggctctgtggagcgcgacagcaccgccgccttcataaagtccagctcgctgtccatcatctgccgcaaaccggagtaactgcggctggtgggcagctggaagggcgccacagggaccttcagctcgtcaaaatggacggagcgtatgtacgcattcagatcgaactcatccagcttggtcaggaaacgggagacactgtcctcccggggcgcatggctgcccagcagccaatcctgcacccgccggcagtaggcggcgcggtcgccgagatcttcagcggcacagcccagcagcgcggcggccacctcccgttgggcggggccgtccatctcccgggaaacataggacgccacggcggcggcgaactgctccggctccgccggctgacgctcgccccggcggaagcggaagatggcggacgggtcgtagttggcgcagcggcacagcttcgccacgctgagccccatgacctcgatcagcgcattgaagttctcccgcagcattttcttgtccgtgcaggcatattcatcgcattgcaggaacgcgctatgcagtgtgtccgcgtccatatccggcagcgcctttgctttggccatatcggccaaagcatcactcagcgccgtgagcacggcgctgccgcggcccggcgtgcgctcaccggtgcggtagcggctcagggacggcgcggatagcccggcggcctccgccagctccttgccccggcagtccagccgggtgatgtattcgttcagctgctcacaaaagcgcatggcgcacctcctgcggtgaaagctgtgtatagtatacgcccatatggcaaaaaagtgaagcaaaaaatttccaaaaccagcaatcgccgcagccggtaatcgcgtttccctgcctcggccgccgtggtacaatagaaaatgtaaaaagcttgtaaatacgtgaaaaattgaaacaggaggatggaacaaaatggcaaagaaaaggttttttccggcgctgctccttacgctggtcctgtcgctggcgccgctgtcagcgtttgcggattccggatcgtatactgttaaattttaccccggagattatggtaccatgcgtaaaaacgaccagatcccgtctgtgtattataacattgatgatgttaacaaacccttctactacaagctgcatgtatccgagacagagactctcagctttgccagcagcatcatggatacgctgcttccaaatcaaggatatgagtttgcctactggacagccgatgctgccgtataccgggtcggcagtggtactgccattccagccggcaccgctctttcctctgatcaattacagaacaaggttaccgtgaaaagtgatgtgacattcacggcccactttaagcagagctctgaaaatcctgacgattcagaaatcaccaccgttgaaatcaccggcgcaaccctttcctacaaccccggtgatgcgccccgggccacggctgccgtagccgccgatcagggcaaataccgaatttacgacgaatggtggcaagagttaaatgaaaacgatgagcccgttgccatatggcattccaacgacaggatatacagcaccttgccgaccattactgcgtttgaaagcgggaaaaaatatgtatattccgttctgctgatgccggaaagggaatatgacttcgccggagaagtcgccgctacggtgaacggaaacgcagtgacagcggttcccgccacagacggctacctgagtcttcccaatgttaaaacgatcacgccgaccggacaaatcactccccccgccaccggcggctactactattccccctctgccggcggcagcagcgccagccccaagaccacggaccccggcgtggcgctctatgccgctgccgccctgctgagcaccgccggtctggcgtggaacggcaggcgccgcgggcagtaaaccagctattctctccgggtcgataccgacaggggtaagccgcagcagcggcaagcaaaaacgccgccctttcgggcggcgtttttgtcgactgcgcacacgcggaaaaacaagcgtcatatcggtggaaataccttaagacccgcgaaccgagtcatacttggaattgcccaaagcgctgaggtaagcgtcgtaggcctcctctaacgaagaaaacgcttctccgtttttcagaatctgcttatactggttttgcgaagtaagtgattgggaaacggcgacatattcgctgccgtttttcgtcctcttgccggtcgtggtttcggaaacataatacttcccgtccccggtctggacgatcacgggaatttcctttccggccccgacttcgttagtgttcagagaggtccagaaaaggtatcggtttgcatcttgtccatcttttccgctgccaagaaaggcccatgtgcagtccggcagctgcaggagactgttgtctaactttttgattgcttcggaaatagccggaacaaaatctgatttcggacacctggagtcaaactcgaagttgggttcattttttacagtgccgtttttccaaaagtctgtactatatagaagctggaagaaattcgtcacgcttgtgttaaacggatacttaggggcagaagggtcggcttttccactccaagtcagaataattccgtaattcttatcatatgaaacaacacaggttccattcggcgtagcaacgcctttccaattatccgtatctcctcggcctttgtaatggacaatgccgccgatatttaccggatcgaccgactgccagtccgcctgcttctgcttcagatcgaccgtgaccgtggcctcaaaatttccgagctgcgcctctgtggagacctgtgcatacgcggcgcgtacattcgcaaggtctgtggcctccctgctcttttcaagctgtgacgcaaataccggaatcgcgatcgcgatcagtacggcaatgagcgcaatgacgatcagcatttccatcaatgtaaatccgctgcgatttcgttttcgtttcatatgatccctactttatctttgataggacaaacacatggtgcacccatcatgaattgttatctttagagtataacacaccgctgtcgaaaaataaagtaatcaaatgaagccaaaaaaggatttctgcgaaaactctgcttttttcgatcccacttttcagccgcaccggtatttcgccatcggagagccacgtctgtgcgatcatagtcccgatcccaggtaacaaactggatgccgtgtttactatgcgttcccgccagtatcgtgccattgaagtcggcaaggatgcggtagtcaccctccagcccgctggcttcgggctgcggagcagtttccatcgcagtcatgtactccagcgttcgggcggcgatgtcctcatcacgaggctcgactcgctgccggcatcccacgaatggcagagccattcgcaggagccctgccggacctcttgatttaacgcgcttcgcgccggtcgaggcagcgtgttcgcgcctgcccgcgacattccaaaaagaaaacaccaccctgatggatggtgtttctttttggagcgggcgacgaggctcgaactcgctacctcgaccttggcaaggtcgcgctctaccagatgagctacgcccgcaggcggcaccactattgcggcgcctatggtgcctcaggccggggtcgaaccggcgacacgcggattttcagtccgctgctctaccaactgagctaccgaggcatatggcgaccaagaaggggctcgaaccctcgacctccagcgtgacaggctggcgttctaaccaactgaactacttggccgtgtggatggtgggaacaactggactcgaaccagtgaccccctgcttgtaaggcaggtgctctaaccagctgagctatgctcccgtacctgtcgttcaaacgacaaggcatattataacgttcccatccgcatctgtcaacaaaaatttttcaatttttgtccttttccttacatatttttcagcaggcccttcaggtcctccgccgagaagtcgtacaccgcgtcacagaactggcacgtcagctggcagccgccctgctcggagagcatctgctccagctcgtcacggcccagggagatcagcgcccgttccacccgttcccggctgcaatagcacttgtaggatactgggcacgtctccagtatcttcaggtcaaagtcgctcatcacgtcccgcagcagctgttccgggtcgtcgtttttgtccagcagcgccgaaaccggccccgcggccatgatgccgccctccaccttggtgatgacgtcctcccccgcgccgggcatcagctggataagatatccaccggcggccttgacgctctggtcccggtccaccagtacgcccagggcacaggcggtggggatctgctccgattccacgaaatagcccgccacgtcctcggcgatctcgccgcccagcagatcgatggtgcccacatagggctccttcatgtgcaggtccttgatgaccgtcaatgtgccctcatgacccacggccgcgcccacgtccagcttgccgtccggccgcagaggcaggtccacatgggggttggtcacgtagccccgcacgttgccctcgttgtcgctgacggccagcaccgtgcccagcggaccgccgcccttgaattgcagcgtcaggctggcgccgtcgcttttcagtgcgttgcccatcatggacgccgccgccagcgtgcgtcccagcgccgccgtggccacaggcagcgtcttgtgtatctgccgggcgcgctccgtcaggccacggctgcaaatggccgccgcctgcaccatgccgtcggtggaaatagctcttacgatacgatctgccatagatataaccctctttcgcctcacacgccccgcccaaaagggcggggcgcggtcattccttttgatccgcccgagtaccgggccgctttatttgcggacacagctgatgtagacccgctgctcatccgcacggggccggcgcatacgcatatcgccgtagacccgaacatcgccaaagcccgccgctgccagccaggcggtcagttcctccacagagtaggcccgctgccggtgcacctccgcgctgcggcgccatgcgccgtcgccgcggcggcggaacaggtccatgtagtaggtacaaaggcccctgtggtactccgtccgccacacgcagtaggtatcccccgtctcatccaggaatacctgaccgtccaacgccgccagcttagccgcggtgttcacgtcgaacaccagcatcccgccgggggccacaaacagatgcagccgccggaacgtccgctgtacgtcctttgggtccgtcaagtagttgagactgtccagacagcacaccgccgcgtccaccgtaccgtacaggtccagcttcggcatggactggtgcaggaatacaggcggcacaccagacgtctccccgcccttgcttatggccgccgccagcatatcctcgctgccgtccacgccgatgacctcgtagccctgctgcgtcagcagccagctcatggtcccggtgccgcaggccaggtccagcaccagcttcaccgggatacggctgcggcacagcagcttctcgatgaaatccagccgctttccatagcccacatcctcggtcagcgcgtcatatgaaccggccagcgcctcatagcagctcatttcttctctttctccttcatcttctccagcacgctctcatacccgccgttgccgtagatcaagctgcggttcactcggctgatggtagcgctggatgcgccggtgcgctccagaatgtcgttgtagatcatcccgtcattcagcagcgtggctacctcatagcgctgctccatgctccgcagctcagacaccgtgcacagatcctggaagaagttatagcactcctcctccgtctccagcatcagaatggccttatacagccggtcattcttttctttctttccgatcttggactttgcggttcgaaccatgatcgtctctccttctttctcccttttcgggtactgatgccagtatagcattttagtccgcgaaagtaaaccaccttattaaaaatatttttgtcgactaaagctgtaaagcgtcacagcagctgccctctgctcgccaccagctcatcgataaacaccttggccgccagcggcagggtgcggcggtccttggtgaccaacagccagcgtccggatgatgggcggatcaatggacagctcccgttccagcgaggtcatcatctggctcaacgcgggccgggtgtagcccaataactccgctgccttggtaaagctgcccacctccgccaccttcaaaaacgctttgtatcgatgcatgctcaaataacatttctgcatgttcatataatgaacatcaattttacttatttataagttaagcatataatgaggtcaccaaaaagtccgggagatggtaacgatagggaaaaacgagtttgcccccggcgcgaaggccgcgctgtacttcgaagcggagttccatgtataaaccacacatcaccatgcctttctctcccccaaaaaggcagcggcggacgcttcgcgtccgccgctgtctttttcacatattcatgcttccgtcttgccgtgcagcttcttttgcagccagtccttaccgtccacatagcgggacacgatgaaggataccacatagtcgcctgcggcattgaccatggtggcgggaggatccaccagattgccaatagccagcgcgatggggtacgcgatggccagctggtcagggaagaagatggtgcaaaccaccagttcgccggtaccgcctccgccagggataccactcatggccacagaggagaacaccgccacgatgatagccaaaatagccttatccgtggagaagtccatcccgaacacgccgaacagaaatgccaccttgatgatggcggacatggccgagccgtccatgtgcatggtagcgcccaggggcagcacgatgtccgtcacgtccttgctgataccggactcctccgctacctccatattggtgggaatggtagccacgctggagcaggtaccgaaggacaccgccgccgggcggaacagcttggagaacatgatcttggcaccgcctttgccgccgccgaaccgggcatagatggggaagaagataaacatataggcaaagctcatcacatagtagatgataagcgtacggctgtaatcgccgatgagcgtcgggccataggtggccaccaggctggcgaagaagccgaagaagccgatgggcgcatagtaggtgaccagctttacggtcttcataatgcagttggtgatatcctccaggaactgcgccgtcttggtctcgggaccgccattcatctggacaccgaagccgaacagcaccgccgccacgatcaggggcagaatggcccggcggctcagcagctccgcaaagtcaggcttcgtaaagaaattgacgatcatatcgccgaagcccagtgcttcgccgacctcgccctccacgatggtgtaatgtccatctaccagcgggaagatgcggcagacgatatacatcagtacaccggcaatggcggcggtgacgaggaacgtggcgatggtcacgcccatgatcttgccagcgcgcttcacgctcttcatattggcgatggcggaggcaatggagcagaacaccataggcaccaccacgcagaacatcatattgatgaacagcgtgcccaaaaactcgatcttgctgccgaaactgggcgcaaacgcgcctaccaggcagcctgccacgatgccggcaagcatacacagaataaaccagtagttcttcagaaattttttcatagtgacctcccactctctcaaatgaagtcttacagtccctattatacgggcatttttcgcaaagtaaatcagaattcctgcgttgttatttgcaaatcctgctgttttcctttggcgtccgccgaaggcccatggccaaactgctttttataggcccgagaaaaggtagagtaatcctgataccccgcctgtgccgccgcctccgccggggtacagccctggcccaacagctgccgggccagcagcagccgtttctctgtcaggtatccatgcacggaataccccgtctcctgccggaaccggcgcatcatgtggtacttgctgatataaaaccgcgcggccaattcatcaatggtcagcgggtccgccaggtgcaggttcaggtattgcagcagtgacaccaccttgctgtcgccgccggcggcgcctacccggtggccaccccggaccacccggttcacctccaccatcagctccgtaaactgcgcctgcgccagcagtgctgccccatagccgccctgccgtaccgtctccgccaatgcctggaacagcggccgcacccggctgccaccctcgtcccggtatacatattgaaatgtctcctgtgcctgtcggaagcactcggagggatcgcagtcccccaccgtcagtgcgcgcagatagttcggtgcgatatacaggatcatcctctcataataatcccccgtttccaccaccggacgatggatgctcccgctgcccaccagcacgaaatcccccggcgccagctcataccgttccccctccaccgcatagccagctctgccggccagcaaaatgatgatcttgtggaacgtatggtagtggtattcgatatattccccccgcccatccgccagatggaacagtcggaacggctccttcaggtagccgcgcacctcatattgcagtggttccatgcgctcacctccgcactttttgccgttattatagcacttgctatgcaaatattgcaagtttccttttcaattataaccattctgaaaattttgtttccattttgtaatttttgtgtagcttttttgatagacttgtgctatgataattcatgttagatgtcgggggagccaattccccgccgactgacggtgtatgccgggagccttaccccggcagatcctatgcgaacggaaggtaatatcccatgcttggaaaacagatcgcggcactgagcctttccggcctgctgcttttctctggcgctgtcaccgccgctaacgcggacgaggccacgcccatcgacaccaccggctacgccgccgcggccgaggtcctggcgggcaacggcgtggcatccagcgccgctaccgctatgcagaccggcagcggcctgcgcctggcccaggcctccggcctgctggacggcggcgagacgcctaccctcaatcaactggccgcccaggccctgctgcaggaaacggctgccctggaaaagcagaacttcctggcggagtatgacggcgttctggtagactgcggctcctatctctccctgcgcgccgagccggacacctctgccgatcgccttcgcatcatctttgacggcaaggcagcccagctgctggacgttaccgatgacggtgaatggtacaaggtcacctatggtaccgacaccggatacgttctggccgagtactgccagcccgtgcattacgcggactatgagggcaccgccgccaccaatacattgctggaagacgttatttctcaggcgtacacatatctgggcaccccctaccgctacggcggcaccagctacagcggcatcgactgctccggcttcaccatgaaggtctttggtgcccttggcatcagccttccccacggcgccaccagccagtattatatgtgccgcggcgtcaccacagaggaacgtgcccccggcgacctggtgttctttgccaccggcggcagcggtatcggccacgtgggcatctatctgggcaacgggcagttcatccacgccagcacctccagcggtgtcatcatcagttccctgtacgagagctactacgcccgcacctacctgtatgccgcacggctcatcgaaatgtaaacacggcagcttcttcatggctccctttttggattcggaagcgccagccaaaaggctggcgcttccgcttttttcttgtactctgcatatttgcatatttattcaattatgcgactatcgtatacagtaatatacacagctacctttcctttgctccccagtttatcgtgtgcttcttgtacaaatttacatttcgtgcggatttttatacaaattcatgttgacatttattcacatcaggtgtatagtagccatcgtcaggagggaaacctccaatatgaccgtctatattccggttcccggtataggaccatacaagatctgaaaggaagtacataacatgaaaaagtttatggcaatgctgctggcgctggtcatggcgctgagcctggtggcctgcggccagaaggctgacgacaccgccaaggatgatgccaacaccgataacaccgatgattctctggtggttctggagaacgtggtggattggggcgagactgagccctaccgcgtcctggtgcagaagggcgaccccaagggtctgctggagggcatcaacaaggccatcgctgagctgaccgccaacgacggcgctcttatcaaggaaatcgaggacaaggtcgcttctcaggatacctatatgcccgacgctgtttcctctgacctggccgccgagaccaccgatgataccgctgccagcgacaagcccgttctggtcatgggcaccagccccgactatcccccctatgagttcttcgcagatgccgctatgaccgagtacgccggcatcgacgtggaagtagccaagtatatcgccgagtccatgggcatgaccctgcagatcgagtccatgaacttcgacaacctggtgacctccctgagcaacggcgactttgacgtggtgctggccgcctgcgagtacaccgaggagcgtgccaaggcctgtgacttctccgatccctactacaccgatctgcctcccgtcattctggtgaaggctgccaacgccgacaagtacaagaccgttgacgatatcaaccaggcctccgtcatcatcggcgcccagaagaacaccaccaaggccatggccgccgcggatatgttccccgaagctgccaacggcatggttctggagtctctggtccccaccctggtcaccgagctgaaaaacggcaccatcgacctgctggtgctggatggcaatgtgggcctgagctacgtgggctgatctccctgtcccctatcgcaaacgtgcaaggcggccgccttgcacgcttgcgtgttcttaagaacttttgaaaggatgcttcgtctatgtcgtggaatgatctgtttgtcaacatggacaacaccaacttcttcaacttctcgttcctgcccaagtacggctccgcctttgtccgcggcttcgagtatacgctgctgctggcggtggtgtccgtgctgctggccgtgatccccgccctgctgctggccatgatgcgcctgagcaagatcaagcctatcaagtggttcgccggcgcgtatatcgccgtgttccgttccacccccatgctggtgcagctgtccatcatctacttcggcttgttccactacattagcctgccccggacactgttgttcggcttcatcgccatcaaccggtttatcccaggcgtggtcgctttggcgctgaacagctcggcgtatgtagccgagatattccgcgctggtatactggccgtggacaaggggcagaccgaggcggcccgttctctgggcctcagcagttggcagtccatgcgcctggtggtgctgccccaggccatcaagaatgtcctccctgccctggccaacgaggtggtcaccatggtgaaagagtcctccatctgctccgtgctgggcatggcggagatcatgtacaccgcccagaccgtctccggcaacagctacatcaccctggctccctacgtgctggccgcgctggtctacttctgcatcaactacccggcctccaaagccatcgaggccatagaaaggagaatgcgccgtggcgataagcagtaaagttctcatctccgtaaagcacctggtcaaggaatacaaccacggcaccgttcacgcattggacggctgcgatctggatattcacaagggtgaagtggtggccatcatcggcccctccggctctggcaagtccacgctgctccgcagcttgaatatgctggaggagcccacctccggcgcaatctacttcgacggtgtggacctggccagcaagtcggtgaacatcgacctccaccgccagaagatgggcatggtgttccagcacttcaacctgtttccccataagactgtgctgcagaacatcacgctggcgcccgtcaccctgaagaaaaaaacacccgctgaggccgagacccaggcccgcacccttttggagcgcatcggcctgtccgacaaggccaacgagtaccccaatatgctctccggcggtcagaagcagcgtatcgccattgtccgtgctctggccatggatccggaggtcatgctcttcgacgagcccacctccgccctggaccccgagatggtgggtgaagtgctggacctgatgcgcgacctggccaaggacgggatgactatggccgtggtcacccacgagatgggcttcgcccgtgaggtagccgaccgtgtggtcttcatggccgacggaaagatcctggaggaaggctcccccacggacatcttcgaccatccccaggacccccggctgcaggatttcctcagcaaagtgctgtgacaacgataaaaagcccaccccttttggggtgggctttttatcatccttatgactttccgtgtatctcattgccgcagcggggacaggtgatgacaatgcgccctttccctctgggcacccggcacaccgcgccgcagcccgggcaggtaaagtagcagtgctctttatccatccgctgctgccttttcccggcaatacggcggctgatgggccaccagaccttctccatgaaccgtgcgttctccgcccgccgcttctccagattgcgggaaaacatccggaacagtgccagcagggtgatgatcccggccacggtgccgatgatgctgtatgccagcggcaccttctcccgcagaaaaatgttgatgatatccagtaccagagccgtccagaccatggtcagcgtcagccggtccacaccgttgcgcccatacatgaagcgcgacagcgcgttgccaatacgttgcaagaagttcataaaaccgtccctttgccttccgcgtccacaccgcaggttttctgacaagatattttacaggaaaagtcagcaaaggtaaaccccttttattcaaaattcacagaatggacaaatttttgtttttttactgccggcgcaaaaccagtcccgccgccttgcaattcgccataaacctatgctataataaattgattatgcaccgcgagccggcggtcacccgccggctcgccgcaggccccgacctctccgggcgggatcggctgcgctgtctgccgcactgcggggcctgcatatcccatactatgccgccgcactgctgccagtgcggcgcgaaaggaagctgctctatgatcaagatcgccccctccatcctgtccgcggattttgcctacctggcccgtgacatcgaaaagatctccaccgccgactacgtccatgtggacgtgatggacggcctgttcgtgcccaacatctccatcggcattccggtggtcaagtccattcgtcccaccaccgccctgccgttggatgtccatctgatgatcgatcgcccggtccgctatgtagagcaattctgcgacgccggtgcggacatcgtcacctgtcatgtggaggcggacaccgaggagaatattctctccgccatcaacaagatccacgccaagggcaaaaaggccggcgtggtggtcaagcccaagaccccgcccagcgccgtcctgcccttcatcgacagggtggagctgatcctggtcatgaccgtggagccgggcttcggcggtcagaagtttatggccgatatgatgcccaaggtacaggccatccgcggttatatcgatgccatgaaccccgcctgtgaactggaggtagacggcggcgtggatggcgacacctgcaagctctgcatcgcctccggtgccaacgtgctggtggccggcagcgccgtatacaaggctgccgacatccccgccaagatcaaagaactgagagggtaacatcctatggagtattttcccgctccgctggaaaaattagtggagcagttcgcccgcttgccgggcgtgggctataaatccgcccagcggctggccttctatgtgctgtccctgccggagcaggaggcccgagcctttgccgacgccatcatggacgccaagcgcaacgtgaccctctgccccgtgtgtcagaacctgaccgccggcggcctgtgtcccatctgtgccgaccagaagcgcgacgacgccaccatctgcgtggtggctgacccccgggacgtgatcgccatcgagcgcagccgggagtaccgcggccgttaccacgtgctccacggtgtgctgtcccccatgaaccacgtaggccctgacgatctgcacatcagatccctgctggaccgcgtggcccagggcggcatcactgaggtcatcatggccaccaacccggacaccgagggcgaggctacggcgctgtacatcgcccggctgctcaagcccttcggcgtcaaggtcacccgcctggcctatggtattcccgtgggcggtcacctggaattcgccgacgacgccacgctcatgcgtgcgctggaagggcggcgggaactgtgaaacgatttgcttgccttatcttggccgcgctgacagcgctgtctctgaccggctgcggcgccgcccggcccaccgagctgtccctgttcgccatggacacctacatgaccttcgtggccatcggcgacggcgctgatgacgtgctgactgacctgagccgcaccgtcaacacgctggaatcctccctctcccgcacggtggacaccagcgaggtctcccgtctgaaccgtgacggctccgccgtctgggacgaggacggtgcgcagctgctgtcgtgggcgctgcagcacagccaggaaacggacggtgccttcgatatcaccatcgccccgctggtggagctgtggggcatcacctccgacagcccccgcgtcccctctcaggcggagatcgacgcgctgctgcctctggtgggctatgagcacgtccaccagtccgaattttgcagcatctctctggatgagggctgctccgtcgatctgggcggcatcgccaagggctacgcctccgactgcgccgccgtcctgttccaccgcagcgccctcaccggcggctgcgccaatctgggcggtaacgtgtacgtctacggcaccaacgcccagaacaagccctggtcggtggccattcaggatcccgccgacagcgagggctatgtctgcaccctgagcctgtcggatgcctttgtggtcacctccggcggctaccagcgctatttcaccgcgccggacggcacggtgtaccagcatattctcgatcctaagaccggctatcccgtccaaagtgacctgaccagcgtctccgtcgtcacacggggtggcttcggcgggcaaggcacccgtgccgacgcctactccaccgccctgtacgttatgggtgagcaggccgccgtggacttctggcgctcccagagcatgtccttcgacatggtgctcatcacccgggacggccgcgtggtctacacccccggtctggccgactgtttcaacgaaaaggacggaaccgcctatgtctaccagctcctcgcctcctgaactgaaatggaaccgctttgacgcgctggtggcgctggcggtcgtgctgctggccgtcgtctccgcgctgtgcttctatctgcccaaaaaccaaagcggcgccctcaccgtggtcatcgacatctccggtcaggaggtccgccgtgtccccctgtccgacttcaccgaggccaccgtcaccagccgcggctatacgctgcacattgccgccgagggcggcgccgtctccgtgaccgacagcgactgtcccacccaggactgcgtccacaccggggctatctcccgtgccgggcagtccatcgtgtgcctgcctgcccaggtggtcgtccacctggagggcgcgtccacgccggacgcgcctgacgcgatcgtggggtgagcacatgaagtggacagcaaaaaacatcgccctctgcgccgtgctggcagcgctggcgctggggctcagtaccctggaggggctgttccccatctccctgctggtgcccctgcccggcgtgaagctgggccttgccaacatcgtgacggtgttcgccctgtatcagttgggtgccggcgcggcgctggccattctgctgacccgctgtctgctgggcggactgtttgccggaaacctgtcggccatgctgttctccgtgctgggcggactgaccgccatgctggtgatgatattcctgcggcgcctgccgaagctcagcgtctacggcgtatccatcggcggcgcggcagcgcacaacatcggccagatggccgcggcggtcatcacccttggcagcaccatggtcttgggctatctcccctttctgctggccgtgtcccttttcaccggtgcgctgaccggcttcatcactgcgcttctgctgcgtgccacgcggcatatccgatttcactgagaggtgccactatggataagaaagatcagatcattttgcagcagctggacgtgatacgctccatgacggagaacaacgtccgccgcatgggcagcgacttctggggcacgcccttccaggacgttggcaaggcccccgccgcccccggaaagcctgccgcgcccgaaaagcccgtcccccccaccgccgacgccaagcccggcgatgccgcgcccgaaaaagccgaggagcttccgcctccggaaaaaatcgaggacctactcgccgagctggacacctacatcggcctgaacgtggtcaaggacgaggtccacgacctcatcaacatggtccaggtctacaagctccgcgagcagcacgacctccccaccaccgatatgtcgctccacatggtcttcaccggcaaccccggcaccggcaaaaccatgatggcccgcatgatggcccgcatctaccgcagtctgggcattctcagcaagggccaactggtggaggtggaccgcagtggtctggtggccggctacgtaggccagaccgccctcaagacccagaaggtcattgaaaaggccatgggcggcgtgctgttcatcgacgaggcttacgccctcaacggcaagtccgaaaacgactttggtcaggaggccatcgacaccatcctcaaagccatggaggaccaccgcgacgacctggtggtcatcgtagcgggctacacggaactgatggacaggtttatccactccaaccccggtctggagagccgcttcaaccgtttcctgctgttcgaggactacaccccggaggagatgttcgagatcttcaaaatgcgctgcggcaagggctacgtcctcgcgccggaggccgagcccctggtccgcgactacatcgccgaggagagcgccgaccccagcttcggcaatgcccgcggcgtccgcaacctgttcgagcacattctggtggcccagaacaaccgtctggccaagctggaaaccgtcacccgcgaggacctgatgaccatcacccccgacgatgtgctccatgcccgcggcaagctggacgactgacacgcaaaaaaagaaagcccgtatgggctttctttttttgttcgctcagtgccgctttttgccgacccacgccatgccggtgacggacaggacagccgtcacggcgtagatacccacgcccgcgtcaaaggtcttgggagaacccttggtctcgtccgccttggtgtcggtggtggggtggtagtagtagccgccggtggagatcactttactgctattgactttctccgcatagagctcggcaatctcattaactctatcggtctctccactggcaacagcgaatttaacaacgtctttcaaattgttatttgaaaactttgcaatgtactttacactatcactcgtatttccactcatactgctgtgaattcgcaccaccgcatacgctgtaacagtattatcggaaaaggtgatcatctcctggcccgcatcagaaaggttcgcgccatcccaattaccggcgatctgaagcgccatattgtcagagttctccgtaggtaaattaaaagtactgccagagatcaccaccgtaggtttggcattacctaaggttgcggtgtcacttcccaccggtacaccaggaataacattaatgccgcggcccttggagttagtggagttaatagtgcacccggtcagcgtgtaggaaatggctctattgtcaaaagcaggctccaccacattcagcgtaatggcatatcccgtagtgctgttgttgaactcacactgatcaaatgtgtattttgccacattgcaaggcatgattttgtacatctgccaagcatcttcaaatgtgcaattaacgaagtcgacttgaatagaatccttaaactgcttagatgtatctactctgcggtcattcaaaatcaccttttgcagcttatccaattcctgctccattatgagttgtaagcaattatgaaaagacctccttccaaaatattgaaatttctttgagaattaaaaagatgctgtgcataatttccctttatactgtgagcatcacaatataaaggaggcaaactatgcacagcagaaagacagttccaatccctgacttgatgagcgcagcaaatatggagttgatccgtctggacttcaaatcgtcaaccctcagtcggcatagcaaggagttccgtagcttctccaattattgcagagaaaacgagattaccgcttatgacgcagaaacgggaccacaatacttccaacactgttatggtttggacatcggtaactccaccgcaaaactgaccaagcaacaactggacacacgctgttcgattcgttttttggatgacatctttcaatttgggtatgcactgcgatacagccaccatgactacacagtgccacggcaatatgtcgatttactggaagaataccttgcatggtgccacagaaataatagttctgatggtactatccgtgtcaagcggacaaagatacggcaatttttttgctttctggatgggcgcggaatagaactttcagatttaaccgctgcagaaatttcggacttcatgaccaccctgtgccgctaccatcgtgcaactatccatgtattcagcagcgttttacgtgatttcttccgctatctccatgaaaatgggatattggacgatgacttatcttcaagtgttccaaggccaaagatctacgttgaagaaaatatccccgaaacgtgggccccagaggaagtacgacaattattgtccgttattgaccgcagcaatgcgattggaaaaagagattacgcgatgcttctgcttgctattctgctgggcatgagggctggagacatctgtgcattgaaattcaaaaatctggactggcaccagaaactgatcacctatacacagcaaaaaacgcaaaaggtcaatacactgcctctgctccctgtaattggagatgccatcattgactatctgaaaaatgggcggctggattctgactgtgataatgtgtttatccgccatatccatccttacggagaattccagtccagcacaactctttccgaaaacctcaagcgatatatgaaatatgcaggtatgacagtaaagaagcgcaaagcagcccattcactgcgtcatactctggcaagcagcctcttgtatgatggtacaccgcttatgacgatctccaacatccttgggcacaacagcccaaaaacgacctccgtatataccaaagtagaccttccggccttgcggaaatgtgcattgtcttatggagaacggagggaattgatatgacttcaaaaatgttgttggagcagtatatggcggaacgtcatgctcttgggttcagcctgaaaacggatgagggttgtatccggcgcttcctccaggactttgctgagcccgatgatggagagatttcgtttacaaaagaatatgttttagaccatattggaaacagacggaacctgcaaaccaataccatcctcagagatgtcagcgcaatcaatggatttctcgattttgtgatccgcaaaggctatacagcatataagatccctcctaaatctctcccgaaagaaaaccgcaattttagagcctatatttttacggacgacgagattgagcggatgctgactgcagcggatcatgtgccatttacggagcagaaccctgcacgaaaataccagattcctgttatgttccgaatcttattcaactgcggattgcgtacttctgaattgcttaaactgcgcatgtgcgatgtaaacctcaaagaaaatgtgtttaccattttggatacgaaatttcacaaaaaccgcttggtgccattctctgatacagttgcagaatccttgactcaatatctggaaatgtcccctccaaaatctacagattccttgctttttccaagtttgaacccacgcagcaacggcggaagatacgggaacagttggctgcaagctcaatttcgccagctcctcagaacggcgggtattccttacaatggttcaggaaaaggccctcggcctcatgatatccgccacacatttgcggtacactgtcttaacaactgggtcctttcgggtgaagatcttaccgctgcgctacccgtactttcacggtatcttggacataatggactgaccggcacgcaaaaatatcttcaattgacggcgcaaatgtacccagatattgttgccaaattagaagtgcaatttggtggtctcattccccagatggaggtgtccaatgaaagcatctgacttctccaaatttttgacgcagtaccttacacactatctgcccgtccagagaaatctgagcagcaatacaattcgttcctaccgggatacgtttaaactcctcctgattttttgcagagacgagaaaggctttaatattgcaaagctgaatctggccaagttggacaaaaagtgtatagaggacttccttctgtggctgactaataccagaggttcttccccatctacttacaaccagcgcctttgcgccattcacgctttctttgattatgttatgaccgaagaaccgacgtatatggagcagtgcattttaatcctcaaaattccaagcatggtatctcccgacccgcccgcgcagtacttaacgccagaaaatttgaaacatttattgtctatgccggatacctctactcctaaaggacggaggcatcttgtcttgctaactgttttgtatgatacagcagctcgtgttagtgaacttgcggatatttgtatgcgggatgtgcgattagatttcccagcagttattactctgcatggaaaaggcgggaagattcgtacagtgcctctcatgaaaccgactactgaattgttacgtagttaccttgaggaaaaccacattgatttgcgacgaaacccagatatgcccctgttttggaatggaagcagacacaaactgacccgttctggaattacatacatcgtccagaaatatgcagatatggcacgggaaactgcctctgggatgcctaccaaaatctcgcctcatatttttcgccatacgaaagccatgcatatggtacaggccaatgttaatccggtctttattaaagatcatctgggacacgccgacatctctaccactgaggtctatgccagagcagacaatgaagccaagcgagctgctttggagaaggctacagcccatcttgatctaccgaaagcatctcagtgggaacaggatgctgagttgattgaatggctgtcctcgcttggctaaaactccaaaatattatgcacagtgaaacagagtaaaatgctctgtttcactgctttttatggaggtgctatacataattgatttctgttcataacgtcatttatgtgttgaagtgcataagggacattttcccaaatgcgacacctgtgatggtcactgttttgacccactgccatttacccgaagtaccttcttttgaagacgcacacttcttgtctgcgtcatcataataggtatatatgaggtggtcatccttgtcaaatgtcccgtcatcacttgcagaaatggcagacagcttaacacggttgatattcgtctcatccgcccagctgacgctgcacaggcccagcgccatcaccagcgccagtatcgttgccaacaatttcttcatgtctcctaccccgttatgtttagatttccgcagatgcgctcgttttaatcctcattaaaacgtaaaagcagaggtacctctgcggatagcttcattatagcaagaattttcggtttgtccagagcattttgtgaaaaaatcccaattttatcattcccggtaacggcgcttacgtttgatttgcaaaaattggaaattccttccccgcgggcagcgtcgttaccgcctcggcgggaagcgcggggaacaactcccctatcctccccggcgcggcggcaagcgtttccttctgcccgtgagtcagcttcgccttgatggcgtattccagccgcgacgctgtcaccttgtcaccgcagcgccacagcgccgccaaagcctccggcgggtgtgcccgggtgtacttggcgcccctgccgctgcaatgcatggccatccgccgcgccacgtcgttggtcatccccgtgtacaggcttccgccacggcaccgcagcatatagacatagtacgcttccataggcggctcctttcacggttttcccctatcatacccgatatttcttgcattggcaagcgctgtatggtacaattccaatttggaaagcgagggagagctatgaccctttttgattactatctgcgctatatgaccgaggtatgggagggcacgcgtcctgccccggagggaatcaccctgccggaaggcggcgatgagaacgcccgcatacaggcgctgggccagcagctgcaggatatgggcatggccgcctttgtccgcgcctgcgccgcccagaacggcacggtgcttccggaggagctgttcgccgaaagcggcgaccttggcagttttgagttgtttcttcaaaacgcggataaggcacaggaagcccttgccgcggagaaaaagtccgcgacccccgaccccgatgccaacaagcacgcctttgaggtgtttctggactgcattgccatggacgacggtcttgtgcagtatctgatcgacgtgctgaagcgcatggaccgcaaggagtttttcaagctcagccagatcaccaccaaactggacctggacccggaggagttcctctactggctgggccgtcgggagatgtacgccgacaaggaggagcagggctgtgccgtcgctatggaccacgccctgctgcggctggcagatgagggacggctggacgtggtggccgccctgctcagcggcgacagaaataccttcgagacctttcgctgcgaggcaccggagcttatgcacgcacccatcgccaccttcgagtggtacgagaaaaactatctggatcgggactatcccatccgactcattatgcgcctgaacggcgtacaatttcccaactgaggtgaactatgaacgaagcatataaggcgctgggcgtcagcgaaaacgtgctggctttcagcgaaacgatcctgtccgacctgaaggaccgctttgcgaccatcgacgccatcgccgaggctaatcagctgaaggtcatcgccgccatgcagaaaaaccgcgtggccgccaatcattttaacctttccaccggctacggctacgacgacgagggacgcgacacgctggagcgcgtctacgccgactgcttcggcgcggaggcggcgctggttcgcccgcagatcacctgtggtacccacgcgctggcgctggcgttaggcgcgaacctgctgccgggggacgaacttttgagtccggtgggggggccgtacgacacactggaagaagtcatcggcattcgggagtcggtgggctcactgaaggaatacggggtaagttatcgtcaagtcgatctattgccggacgggtcgtttgacaccgataaaatttgcacggcaataaacaaaaaaacaaagctcatcacgatacagcgttcaaaaggctacgctacaagacccagcttctcggtggcgcagatcggcgagttgattgcgttatgtaaacaatgcaagccggacgtgatctgtatggtggacaactgctacggcgagttcacagagctgatcgagccggtgaacgtgggcgcggacctgatggtgggcagccttatcaaaaatcccggcggcgggctggcccccaccggcggctatatctgcggccgcgccgacctgatcgagcgctgcgcccggcggctcaccgcccccggtcttggccgggaggtgggcgcaaatctggggctgctgacccaattttaccagggctttttcctggcgccgacggtggtggcctctgcggtgaagggtgctgtattcgccgcaaattgttatgaaaaacttggttttcatgtcattccaggcgcttctgaggtgcggcacgacatcattcaggcggtagaactgggcagccgggaaggcatgatcgccttctgcaagggcatacaggccgccgcgccggtggacagctatgtcaccccggagccagcccctatgccgggctatgacagcgacgtcatcatggccgccggtgcttttgtgcagggcagctccatagaattgtccgccgacggccccacacggccgccctacgcggtgtatttccagggtgggctgacctggtaccacgccaagctgggcatcctgatgagcctgcagaaaatgctggaggccggcctgatctcattataattatgtaaaccatggaggaaatcgtatgtttctccccaaccatccctttcggcggcgtccgcctcctttttctgtgcattttatgttcgttgtttatacttttactttctgaataatgtacattaccgtatagcaggtcttgctatacatgatagaataaggagttttttatgtggttttggttttctctgatcgcactgatctgctggagcggctctgacctgttcagcaagatcggctgccaggacgcagacgacaaatacagccatcttaaaatggtgatggcagtgggcctggtgatgggtctgcacgccgcctatgagatttttatcaacggcacggagatcaacggcagcatcatcctgacgtatctgccggtgtccctgctgtacatcagctctatgaccatcggctacatcggcctgcggtatatcgagctgtccatctcctcccccatctgcaattccagcggcgcactggtggcggtgctggcgctggccaccggcggcctgggcgagctggtgccggcgcagctggccgccacagcactggtatgcgtgggcgtcatcggtctgggcatcgtggaggcccgggaggacgatgacctgcgggctgcacggcagcaggccagcaaccaccgctacgccaaatcggcgctggcgctgatcctgcctgtgatctattgcctgctggacgcgctgggtaccttcgccgacagccgggtgctggaaacgctgaacgaggacagcgccaactgcgcctatgagctgacgtttctgctggcgggcatcgtatgcttcgtgtatgtggtgctcatcaaaaagagccgactcgtccccaagcgggagggccccaagtatgcgggcgccgtgtgcgagacggcgggccagttcgcgtacatctacgcgctggcggacacggagcacgtggccctggccgcgcccatcatctccgcctactgcgtggcctcggtgctgtggagccgcattttcctgaaggaaaagctcagctggaagcactacgccatgatcgcactggtggtggcgggtattgtgatactgggcatctacgatgcataacaacaagatatcccccgccgggtccggcgggggattttctgcgcctgcgggcgcgggaggtggaatttcgcgctttcgagcgcgagttacttttgtctttggcgacaaaagtaaccaaaagcgccacttgaaactacgtttcaagacttccttgcgcggggcggcaggtgcgaatttgacggtgctgatttcgcggaattggtacggtgggtgacattgtcggttcaggggacttcttatacctcttgcgccgctaccgctgacgcagtgcgaaggtaggggctggtgcgctggacagtttgggcgattatcaaatcgcgccaaagccgccccgagggcggctttggcaggtggcggctgacgccgccaaggtattgggggtgccgcctgcgggcgggacgaaggagttttacgccgctgcgcggcgacacctcatccgcctcctgcgggggcacctgtctccctgcgggtcggtcggttcgcggatctgacacgccaccggcgtgtcattcaacaccgcgaacccctcaaggggaaggcttgagggtcagagggagatggtctggccctggccgttcttccgggcggcgtccagcagggccgcggcggtggaaatgtcctgcaaggcgattccggtggagtcaaagatggtgatatcctccccgccggtacggcccggggcggcgccggagatgacgccgccgatgtcgcagagggtgccgtcaaagatgccgttcttataggggatctcgcactcgcccacggacaggcactgggctgcgtcgtcgccgaacaccctggccgcggaaaacagggcgctatcgatctcctgcttgccggtcatatccgcgcccacgcagctgatgtgagtaccgggccgcacccattccgccttcaggaacggctcccgggcgggggtggcggtgaggatgacatcgctctgcttcgcggcagtctccagacttggcgcggcggtgatggcggcatggcagccaccgcaggcggccaacagcttctccacctggggaacgatcgccgtgcaggcggcggcagagcgctcgggatggtggggattggccacatagaccgttttcagctgcggcaggcagtacagcgcggcggcgatcaggtagggggccagcgcgccggtaccggccatcagcagtgtttcggcatcggggcgggccaggtatttagcgccgacagccccggccgcgccggtgcggaaatcggtgatggggccggcgttcagcagcgccctgggcgcgccggtgtgtatatcgaacagcagcgaggtgccgtacagggcgggcaggtctttggcggggttatcgccgaaccaggacaccaccttcatgccgtaaagccccaggccgttcatatggccggacttgatatccaggtccgccgcaccgggggtgaactcgtggaacaccatgggccacagggccgcaccgccggtgctcttttccagataggcctgctccacggcccgaaccgccatggggatggtcagcagcgactggatggtcgcgccgttcaataccgtcaattctgtcatggtctgttcctccttattacaatttgtcggcaaaggcggccaaggccgccaggccgtcctgcagggtctgcttgtcacaggcgtagccgatacgcatactgtggggctgctcgaagcagtcgccgggggtgacgaacgcgccggtctggtggtacatctgcttgcagaagtcgtaggacggcacatcgaagtcgtagtacaccagggcggtggtgccggccttgggcttggtatagtagaagtgggggtgcgcggccacccaggcgtccagcagagccaggttctcccggacgatggtctggttgcgcttcagcagcacatcaccgtgggccagggccagggcggccagggcgtcatccagcataccgcagctgatgaggtcatagtcccggtgggacaggaacgcggtcagggcggcctcgtcatgggtggcgatccagcccatacgcagccccgccagggagaagaccttggacatactgctgacggagatgcccttttcgtacaggtcggcgatggaggggctccagtcgtcggtctgggtcaggtggcggtagacctcgtcgcagaggacgtaggcgcccacgccgcgggcgatggcgacgatctgctccagcaaggccggggacatcagcgcgccggtggggttattggggttgttgatgcagatcatcttcgtgtccggcgtcaccagcgccttcagctcggacaggtcggggaggtagtcgttctcctgcttcaggtgcatgatggccacctccgcgccgatggactccggaatggagtagagctgctggtaggtgggcataatgctgaccacccggtctccggcggagatgagggagcagaacacatggtggttggcgcccgccgcgccgtgggtgggcaccacctgatggggctgcacagtcttgtagagcttgcagatgccctcgcgcagggcgtcgctgcccacgatgtcgccgtaggtcaggcgcttggcgcagaggtcggccagaaaggcctgcttatccacgccggtcagggcgaagagctggtccggggaaacggagtccacgcaggtctccgcgatgttgaagcgagcgcccacttcatattcattcatccattcttccacggcaaagggcttgatgtacatagcgttttctccttttctggtaaaaagtaaaggcacccaagaccggcgcttatccgacaaatgtcggaatacctacgctccggtcccggataccttgatccccccatccggtgacgggggaggccttctgtattcagcttggttatagtatagccctgcggcggaaaaagtcaatcggcgatttgcataaatatacaggtgttccgtgcatattatgtgtagtgcggggcgaaaaaagggaccgctttcgcggtcccttttgttggctcgtaagaggttcggcttagaagcagccctgctccatcatcgcctcggcgaccttcttgaagccggcgatgttggcaccggccaccaggtcgtagcccaggccgtactcggcagcggcctcggcggacaccttgtggatgttctccatcatcttgtgcagctgatggtcaacttcctcggcggtccagaccagacgctcggagttctgggccatctccagggcggagacgcccacgccgccggcgttaacagccttggagggagcgacgatgatgcccttctgcttacgcaggaagttcagtgcatcgttggtggtgggcatattggcgacctcgatgtagtacttcacgccggaagcagcgatcttctcagcggactccatcttgacgtcgttctgcatggcggcgggcatatacacgtccacatccttgacgccccagcacttctcgccggcgacgaactcgcagccgaacttatcggcatagggcttgcagtgcatgggatccttggcgcgcatctcgaggatgaagttcagcttctcgtcggtgataacgccgtcgggatcgtggatatagccgtcggggccggcaaagtaggtgaccttagcgcccagctgagaggccttcttcatgatgccccagccaacgttgccgtagccggaaatggcgatgcgcttgccctcgatggtatcattctcgtgcttcagcacttcctgcaggtagtacatagcgccgtagccggtggcctcgggacggatcagggagccgccgtagctcaggcccttaccggtgagaacgccgttctcccacacgcccttcagacggcggtactggccgtacaggtagccgatctcgcggccgcccacgcccatgtcaccggcgggaacgtcgatgtccggcccgatgtagcgatacagggcggtcatgaagctctggcagaaacgcatgacctcggcgtcggacttgccggcgggatcgaagtcggaaccgcccttggcgccgccgatgggcaggccggtcaggctgttcttgaaggtctgctcaaagccgaggaacttgatgatgccttcgtacacgttcttctggaagcgcaggccgcccttgtaggggccgatcgcgccgttgaactggcagcgccagccgcggttggtgtgccactgaccgttatcatcgcaccacacaacgcggaaggtgaacatacgctcgggctcgaccatacggcccagcaggtcgaccttctcatactcggggtgcttttcgatcacaggctccagagaggacagaacttcctcgacggtctgcacgaactcgggctcgttgccatgcttggtcttgacgctctcgagcacgcttgccagataagcattcatattaaattcctcctaaaatttgttccgcagacatatgagatgtgcgctacgcagactacccatatactaccaatgttgataataacaccatttggccgatttctcaagggggtttgggagaattcccccctcgcaaaaccacaaaactttttcgtccctttttgtgcaatttggcgaattgtgccccgcgttccactatgcagaaaaaggccgcgattttcggcctttccgtgctgtttttgcgtgcttcgttactttaaagcgccgttcgcttttccgtgtgaaatcggcggcacattcaaaagctgccgatggggatatcgccgttgtccgttcccttttcgatggcgcgtatctggagatagtagcccttgccgccgcccatatccacatagacacggtcgccggcctttctgcccataacggcgcggcccacgggggattccttgctgatccagcccttcagggcatcctgccgcagggtggtgaccagctggatctttcggcttttgcccaaattctccatgaagatctccacggtgtcatagagcccggcggtatcagcggcggacctgtcctcgatgaccttggcggtcttgatcatccgctggaggtagcggatgcgggcgtcgttgcggtttttctcctgcttggcgcacttgtactcgaagttctcgctgaggtcgccgaaggcccgggcggtctggacatcctcgatcagcttggggcgcagctgctgcacccggtagtcgatctcctcctgcattttttgcaggtcggcgcgtgtcagttcatcatacatggtcattctccttccataaggcggcaagacgctccagggcggcgggaagccggtccaggtcgatgccggtatagttgaccaccagcacgtgctggggtgcgtcctggggacactggtagtaatcggacagcatggccagacggataccgcgctgctccgcctcgcggcggagcatctcgtccggcggcgcaccatccagccgcagcaggaaatgcaggcccgcgtcctcctcggtgatggcggcatagggggccagcgggctttgatgcacggcggcgatgacagtgtcacgcttctggcggtagtgcttacgcatacggctcaggtgcttttcataccagccgccggcgaggaactgggccagggtgtactgctcgaaggcggagacggtgcaggcgtaaaagcccagcttctgccggaagtccgccagcaggcggcggggcaggaccatgaagctgatacggatagagggggcgatggtcttggaaaaggtgttgagatagaccacctgctcgccgccgtcgatggagaacagggtggggatgggacggcctacaaagcggaactcgctgtcgtaatcgtcctccaggatgacccgcgccgggacctcctgcgcccagcgcagcagctcctggcggcgggcgatgggcatgaccagaccggtgggatagtggtggctgggagagatgtggaccacgtcggcgtcgctgcggcgcaaggcctccgccgatacgcccgcctcgtccaggggcagagccgtcacctccgcgccggcggcgcggtagatatgggcgatcttgccgtagccggggtcctccacgccgtagagacgatcacggcccagcagctgcaccagcaggttgtacagcacctcggtgccggcacctacgatgatctgctcggcagtgacctccatggcacggaactgccgcaggtgggcggcgatggcctgccgcagggcccaggcgccctggggcggcgtggaccgcagcaggccggtaccctgctccagaatggtctggcgcatgagtcgggcccagacggtgaagggaaagtcctcggcggcgatggagttggtggccagatccaggaaccaggcaggctcgcggggcggaggcggctgctccggggacgcagggacggccgcaggcgacggcagcacggcgctgacgaaatagcccttcttctccacaccggtgagatagccctcggccatcagctgttcgtaggcattctttacggtgatgacgctgacctccagatgggcggccagggcgcgtttgctgggcagcttctcccctgccgtcagacggccggagaggatgtccgccttcacccggcggtagagctgctcatacaggctgaggcccgcctgtttgtccagggtataggtgagcacggggccgtccctcccttcatctggtattaacaagtaaaatcaaaatggatattttaatcataccagttactactataatacaaatcgtcaacgaaagcaagggctttttcaacagctaccctctcaccccccctgtggcggtccccgtttccctgcggggcgggggccgcctcctatagcagaaagaaaaaatcctcgtaaaggagaatgtgttatgtccgataagaagatcaaatctatggtaatggcggcggtcatggccgcgctgacgtatgtggccaccacggtcatcaagatccccgcgcccaccggtgggtatgtccacatcggcgacgggctggtgctgctgtgcggctggatcctggggccctggtggggcggcgcggcggccggtatcggctccatgctggtggacctgctgggcggatatatgtccttcgtgcccggcacgctgatcatcaagttcctggacgccatggcggcagcgctgatcgtgaaggctctgggccgcaagacctacagctatgtggtgggcggacttgccggcgaggccatcatggtagcgggctacttcgtctatgaggcgctggccctgcagctgggcatgggcgcggcagccggtgtgctggccaatgtgggccagggcgccgtgggactggtcattgcgctggtgctgatggcgctgctgaagggcagcaaggctctggacaagctggccgtacagtggtaaactatatacggtgaaagaaacggctgcggcggggcttttgccctgccgcagctgcgcacagaaaggaaggatatactatggcaggtatcgtgcatgaaatagaggaccgcagcttgctggagcaggtgcggcaggaggccgcggcggcggcacaggagctggcggaggccgcccatctgcataggggccagatcgtggtggtgggatgcagcaccagcgaggtggtgggcaagaaggtgggcagctggtccacgccggaggtggcagacgccattttcgcggggctgcacagcgtattcggccccatgggcgtgtacatcgccgcccagtgctgcgagcacctgaaccgggccatcatcgtggagcatgaggccgtgcccacgctggatatcgtgaatgtggtgccccagcccaaggcgggcagttccttcgccacggccacctataaggcctgcgcccacccggtggcggtagaggagatcaaagccgacgcgggactggacattggcgggacgctgatcggtatgcacctgaagaaggtggcggtgccggtgcgcctggcgcagaaccacatcggcgacgccattctgctggcggcacggacgcggcccaagtttatcggcggcgaccgggcgcactatgacgaggcgctgaaggaaggctatccggaattctgaaaattctgcggcagcaaacaaaaagcagcgctttgcgctgctttttgtttgttatgtgatcgggaacgtgagcttcagcgccaggaacacggcgatcgccaccggtacggcgatgaggaagcgcttacagtttttgcgggcacgctgggacagcgcctcgtcctcctcgtttttccagcggacatagctccagccggcacccagaaggcacagaacggggacgaaatacaggccgatcgacgcgacgtaaggcataggtcatcctcccttttttggtgcttacagtatacaggaaacaggaggaaaggtcaaggaaaagacttgcggggacaaaaaagagacgcccgagggcgtctcttttttatattgtgctgggtccgatcacttagcggccttggcagccttgatggactcgatcagctcgggaacgaccttgaacagatcgccgacgataccgtagtcagccacctcgaagatgggggcggtgtcgttcttgttcacggcgatgatgcactcggagtcctgcataccagccttgtgctggatggcgccggagatacccagagcgacgtagaccttgggatggacggtcttgccggtctggccgacctgatggtcagcggagatccagccggcgtccacgcaggcgcgggaggaacccacgacgccgcccaggacctcagccagctcctcggccagcttgatgccgccctccacgtccttggagataccacggccaacggacacgatgaagtcagcgccgatcaggtcaaccagcttcttggcggccttgacggtctcggtgacctcggtgtggatgtcagcagcagccagctcaaaagcgggatgcaggatctccacgttcttcttgcactcgcgcttcttcataacgccggggcgaacggtcgccatagcggggcggaagcgggggcaaatgatggacgccatcaggtgaccgccgaaagcgggacgggtcatcttcaggtcgcgggacacatcgtggggctcacggttgatcatcacggtgcccagcttctcgatgcgctcctcgggcagggtggaagcttccttcaggaagcccttgtagttgggcatgtcgatgtccaggtgggtgcagtccgcgcacagaccggtgtgcaggcgagccgcgcagcggggggccaggtcacggccgatgttggaggcgccgaacagcagcacctcgggcttcagctcctcaacggcctccacgatcaccttggtgtaggcatcggtggtgaagtccttcagcaggggggagttgtacacgtacaccttgtcggcgccgtactcgcccagctcggcggcgatgccgtcaacgttgtcgcccagcaggatgccgcacagctcgacacccagctcattggccagcttccggccctcggagatcagttcgaaggtggtgggcatcatcacgccctgacgctgctcgcagaacacccatacgttcttgaaggcagcggtatcagcactattaaaagccattttcttttctccttccttagatgatgtgcttggcggccaggatgccggccagcttgtcggtggtagccttgtcagcgccctcgagcatcatgcccgcgcccttctgaggaggcgtgaaggaggtcagaatattggtgggagaaccggccagaccgatggtgctcttgtcgatcagggggtgatccttcagggtctcgtaggtcatagtgaccagaggcttgctgtagcactcgaacgcgccgcccacggacaggtaacgcggggtgttcagctccttgatgcaggtgatcatgcagggagtcttgaccttgatggtcatgtagccgtcctccagcatgcgcttgacggtcagggtgtcgccgtccttggtgatctcgccggcataggtgacctggggcagatgcagcttctcagcgatctggggacccacctgtgcggtatcaccgtcgatggcctgacggccagccaggatgatgtcgtccttctcgatgccgtaggtatcgatagcggcagcgatgatctgggaggtagcgtaggtatcggaaccgccgaactcacgggcggtgaccagaacaccctcgtccacgcccatggccatcagctcacgcagcataccctctgcgggaggaggacccatggtgaacgccacgaccttgcagcccagctcgtccttcagggacagggcggcctcgacggcgttcagatcgtcggggttgatgatggtctgcatggacgcacggtccagagtgccatcgggattgacggccaccttaccggaggtatcggggacctgcttaacagttacgagaattttcattttccttttacctcctaccttacttcacgcccagattgctggcgatgaccatgcgctggacctcgctggtgccctcgtagatctcggtgatcttggcatcacgcatcatgcgctccacgggatactcacgggtgtagccgtaaccgccgaacagctggacggcgcggcgggtcacatcggaagcggcctcggcggcgaacagcttggccatggcggcgtccatggagtaaggctcgtggttctgcttcttcatagcggcggagtagaccaggaactgcgcggcctgcatacgggtgtgcatctcagccagctggaactgggtgttctggaactgggagatgcgcttgccgaactgaacgcgctccttggtgtacttgatggcttcctcgacagcgccctcgcccaggcccagggcctgagaggcgataccgatacggccgccgtccagggtcttcatggcgatcttgaagccctcgcccttcttacccagcatacggtccttgggaatgacgcagtcctcgaagatcaggtcgcaggtagagctgccgcgaatacccatcttcttctcgtgcttgccctgagagaagcccttgtcgtccttctccacgatgaacgcggagatctccttcatgctgcggccgcgcttgtcaacggtcttgccggtgacggcgatgaccacgaaggtgtcagctacgttgccgttggtgatgaagcacttggagccgttcagaatgtagttctcgccggactcgtccagcacggcggtggtctgctggccctgggcatcggtgccggcgccgggctcggtcaggccgaaagcgccgatcttcttgccggagcacaggtcgggcagatacttcatcttctgctcctcggtgccgttctcgaagatgggggcggcgcacagggaggtgtgggcggaaacgataacagcagtggtaccgcagaccttggccagctcctcgacgcacatggcgtaggagagcacatcagcgccggcgccgccgtactccttggggaagtaaatgcccatcatgcccagcttggccatcttctcgacggtctccatggggaagcgctcttcctcgtcgatctcagcggccaggggcttgacctcgttctccgcgaaatcgcggtacatcttgcgaacgagcagctgttccttcgtcagatggaaatccatacttttttctcctttttctgattttacttgttgtagttgaagaagccttcgccggacttaatacccaatttgcccgcacgaaccatcttccggatcagcacgtttgcgcgatacttgctatcgtgagtctcgttgaacagcacgtccataatgttcagcaccacgtcccagccgatgaggtcgcccagatgcagggggcccatgggatggttgcagcccagctgcatagcaatatcgatatcttccgcggaggcaacgccttcctgcagaacgcaaacgccctcgttgcagtaggggatcaggatcttattgaccacaaagccgggggcctcgttgaccaccacgggggtcttgccgatctccacagacaggttcttgatatagtccaccaggtcggcgggggtgttgccgccggcgatgacctccaccagcttcatggcgggcacggggttgaagaagtgcataccgatcaggtgatgcttcaggccctggcccatctcggtgatggacagagaggaggtgttggaggcgaagatggtctcgtccttgcagatggcgtccagcttgcccagcagttccttcttgacggccatgttctcggccacgcactcgatgaccagatcggcatcggcggcagcgtcaaactcctcgaccagaacgcggctcatgatatcgtccgcggcttcctgggtcatcttgcccttggcgaccttcttgttcagggaggcggccagcttgtccttatgacgctgtgcgctggcggtgctggaagcatacatcagggcggtgtggcccttcgctgcgaaaacctgggcaatgccgctgcccatcgtaccggcgccgaatactgctactttcatgatagttcctcctacttaaatttttacatgaattgcttaattatcaggcggtgtgcctgtcaattaacttacttgttctgatagggctcgtgcttgcgcttctccaggaaggcggacataccctcgatctggtcggcagactggaagcagctgccgaagagcttttcctcgatgacgatggccttgtccatgtccacctgaaggccctcgttgatggcctgcttgcaggcgcggacggcgataggcgcgttcttggcgatggtctcggccagcttctcggcggcgggcagcagctcgtccaggggatagacggcgttgaccaggccgatgcggtaggcctcgtcagccttgatattcttggcggtatagatcagctgcttggccatgccggggctgaccaggcgggccagacgctgggtgccgccgaagccgggggtgatgcccaggccggtctcgggctggccgaagaccgcggtgtcggcgcagatgcggatatcgcaggccatgctcagctcgcagccgccgcccagggcgaagccgttgaccgcggcgatggtggggatgggcagcgtctcgatggcgcggaaaacatcgttgccgtgcttgccgaaggcctcgccgccctccttggtcagggtgctcatctcgccgatgtcggcgccggccacgaaggccttttcaccgctgccggtgatgaccagagcgcggatatccgcgtccgcctttacggtggacaccaactcgtccaggtcggtcaggacctcggaattcagcgcgttcagcgccttgggacggttgatggtcgccacggcgatgaggcccttcttttccagcagaatgttggtcatatcaagttcctccttatggttcctttccgtgagcgcagcgcccggaaacggcacatggccggcgggtgggcatacgcctcctcatacatatcacattatagtggcccgttagaaatttatcaagtccaacccaccggctttttgcttttttagcggtttccacaaaagtggacaccggaatttgcacacttttgcggggcggaggcggcggagaggcggtgatcagcggaaaatgaggcggcgcggaaaatgatacttgtgcgcggaagaatttcgtgctatgatggggccacgtgtaaaagggaggaatcgccatgcagaacgaggaaaagatcttagggctgctggagcagctggtggaggacgtctccgggctgaagcaggaatctgcggagacaaagaaagagctggctgcactcaaggagcagatgagccggatggatgaacgcctacggcgggtggaactgacacaggagaacatggtcctgccgcagcttcggctgctggcggaggggaacgacacactgctggcgcgatctgcccctgtggagcgcgtggaggccgtggagaccgatgtggatatgctgaagaccgtggttcgtctccattcgcaggacatcagcgcactgaaaaaggcgcgataacaccactttactttagaaaaacagtgaggaatcacgtatatgcggatgcggaagaaaaaaaatctggcgccccggatggaagcctgcggcgcgtacctgatccgggacccgttcgccctgcgggggcgctggcgggagctgatgccggaggcacgggagctgcgggtggagctgggctgcggcaagggcggcttcaccgtggggaccgcggcggcagagccggaggtgctgctgatcgccgtggagaaggtgccggacgccatggtggtggccatggagaaggcgcgggacgcggcgctgcggaacgtatggttcgtagacggggacgctgcgctgctgccggatatgttcgccgatggggagatcgaccggctgtacatcaacttctgcgacccgtggcccaagagcaaccagaaaaagcggcggctgacccacgggaactttcttaaaaagtatcggcaggtgctggccgagggaggacagatccacttcaagaccgacaacgacaagctgtttgagtggtcgctggaggaaataccgcagttcgggttcgcgctgtcggaggtgacgcgggatctgcacgcggacgggccggtgggcgtgatgaccgactatgagcgcaagttctacggcgaaggcaagagcatcaaccgatgcgtggccaccatggtggaatggacggagccggagatagaggacgtcccctcccctgctgagtaaacaaaaaaggcacccctgacggggtgccttttttatttcgcgcggcgccggggtaagacaccgcaggaaacggtgtcagtcctcgcgctttttgcccacaaacgccacgccggcggcggaggtcagcgccatgccgacatacagagcaatgcccgcgtcgaaggtcttgggagagcccttggtggtggtagacgtggtggtatcgctggtggaggggtagtagtaataggagatcttggttaccgtccaggtaccatcatcattcttcgtcgccttatatccggaaggcacagtaggctgactggtataggtgccgctggtgatagcgccgtccgctacgaccttataagcgccgccgtccttctggacgatcttgtcggccgcaacataggcgtccacatcgctggagaaggtgccgccggtgatgaaaccggtcacaacacccgttgcattattgccaacatagctgccaacggcatttgcattcgtgctgctgaatgtgccgccagtaatgctcacagcgggatcaccgccgggatagttgcacttgtcaatgaccagggcttcgcccgtaggattgccgccatttccatagtacgcatagtccgccttagcaccattacccacgatcgtaccaccggtaacagacacactgccacacttcacgtagatgccggtcgcaccggtaatagtgccgcccttgatgttcaggttgctggtgttcggatagtaaatgcccagaccgccgtcgttcgtgttcgtgaccaccgcaccgtcctcgatattgatggtaacgccgccatcggaagcattgccaataccggaaatcgccgcaccgccggcagccgtcaccttaccgtacacggtgacctcggaccctgtgttctgaacggtaataccgcccttattcgcatccgtgctggtggcattgataaccatgtccgcggcaaccgtcagcttcgcgccgctctgcacccacgcggcccacttcaggcactccagcgttccgtttttcagcgtcagatcgctattatatacatcgaatccgccgccagccgctaccgtcatcgtgcatccgccgaaatcgattgtgagcgcctttttaacttcggtatagctgtcgccatccacagttaagtcattcacaagcgcgatagtatccccggcctgcgccgcagtgatagcctctgctatcgtcttataggttgcgtccgctgcgcgtgccggtgccgttgtgtagcttacacttggatcgaccttcaatgtgacagggtcatccgcccagctgacgctgcacagccctatggccatgaccagagccagaatggttgctaatacctttttcattgttaacactccccaatgattttgatatttccgcagtctgcttcgttttaagcttgttaaaacgccaaagcaggagtactcctgcggatgagttgattataccacaatttccgtggttgtccagagggttttgtaaaatatgccggtttttccggttttggggcaaatagggggaggaattggggggaaatgggaggggggaagcgcgcggggcgcgcgacacctcatccgcccctgcggggcaccttcccctcgaggagaaggcatgggggttccgcgcctgcgggcgcgggggacggattgccacggccagtctgcggactggtctcgcaatgacagggacgcaagaaggcagattttcttggtaaaacctattgacattgtagggtttatgtggtaggcttttcttacctacaaaaaagatatgttaaaggagtgatcctatgcaggtctatgcagataatgcggccaccacgcggatgagcgacaaggccgtggcggctatgacgccctatttccagcagttttacggcaacccctccagcctgcacaccgtgggccagcaggccgcggaggcgctggcggacgcacggcggcgggtagcggactgtctcgggtgcagctttaaggagatcacgtttacctccggcggcagcgaggccgacaatcaggccattgtctccgccgcccacatcggtgagcgaaagggcaagaagcacatcatctccaccgccttcgagcaccacgcggtgctgcacacgctgaagaagctggaaaaagagggctttgaggtgacgctgctggacgtgggtcccacaggcaccatcaccccccagcaggtggcggaggccatccgggaggacacttgtctggtgaccatcatgtacgccaacaacgagatcggctctatcctgcccatcccggagatcggcaaggtgtgccacgagaagggcgtgctgttccacaccgacgcggtgcaggcggcgggccacctgcacatcaacgtgaaggagcagaacatcgacatgctgtccctgtccggccacaagttccacggccccaagggtgtgggcgtgctgtacgcccggcagggtatccccctgaccaatatcatcgagggcggcgcgcaggaacgcggcaagcgggccggcacggagaatatcccgggcatcatgggtctggcggcggcgctggaggagtcctgcgggcacatcgatgaggacaccgcccggctgacaaagctgcgggacaagctgatcgcgggactgagtaagatcccccacagcgcgctgaacggcgacccggtgcaccggctgcccaccaacgtgaacttctgcttcgagggcatcgagggcgagagcctgctgcttctgctggatcaggcgggtatctgcgccagctcgggcagcgcctgcaccagcgggtccctggaccccagccatgtgctgctggccatcggccgtccccatgaggtagcccacggctccctgcggctgagcctgtgccacgacaccacagaggcgcaggtggactatattctggagaaggtacccggcatcgtggcgtatctgcgggatatgtcccccatgtggaaggacctggagtccggcaagcggacattcattctgtaatgtaaaggagcgttgattatggctttgtataccgataccgtgatggaccacttcctgcacccccggaacgtgggcgagatcgccgacgccgacggcgtaggcgaggtgggcaacgccaagtgcggcgacatcatgaagatgtacctgaagatcaaggacgacaagatcgaggacgtgaagtttgagacgttcggctgcggcagcgccatcgcctccagctccatggccacggagatgatcaagggcaagcgcatcgaggacgcgctggccctgaccaacaaggaggtcgtggacgcgctgggcggtctgcccgcccacaagctgcactgctccgtgctggcggaggaagccgtgaagtccgcggtgaaggactactacgacaagaacggcatcgcctacgacaagagtaagttccccgcctgcgaggactgcgagagctgccggatggtgtgaaagacggaaaagaaccgccggagggcggttctttttttgttcaaaacacgccgtagccctgaccctgggtgatgatgtaggaccaaaggaccgggccgacggcgccggtgggactgtaccccaggcggttttgcagggtgcggaccgcggcggcggtggcggggccgaagatgccgtccgcggcgacggcaggcagggtgctgtcccgctgcgccagccggttcagctgggtctgaagcagcgtcacctccgggccggtgtcgccctccaccaggaagcggccggggtatatctgccgggcgaaggtctggtactccggcggcagctggtagagcgtctgctcatagacgttctggatggcgttccatgtgttccgccccaccacgccgtccaccgtcaggccataggtgctctggaaggccagcaccgcgtcccgcagctcgttgtcgaacacgtcagtgatgcggatgggcggcagctccggcaggaagaagcccagaaacgccagatagaaccggatggcctggacgccgatgccggtatcgcccaggcggaggaccttggggaactgccgctgggcctcggagatggtcaggccctcgctggtgacctcggagaggctcttgacgccgttgtagatggacttgatacggtaccaggtggacttgcccacgatgccgtcctgggtcaaattgaaaatgcgctggaaggcgcggacggcggcggcggtgtccgcgccgaagacgccgtcggtctcggcgatagcggggatggcgggatagttcttgcggatgcggttcagctcccgctggatggtgcggacgtcctcgcccacgctgcccacggtcagcggccgtccgggataggagggcgtgctgtcgcccaccggggcgttgtccaccaggtcgatgtcctgcccgtagtagtattgcagtatctcatagggtgttttcccctgggcggccagttcctggctgccccactgagacagcccccggcactgggtgcgcacgccatcgcagaactgggcgtacagcggctccacgttaccccggcggacgatgtagttgttgaacatatcgtccacgatggcgttgatgttctcgaacgtctccttatccggggagaaggcctggtcgtactgggtgttgttggtgatgtcgaaatcgtagccccggctgcggtagaactccgtatagacccggttcagcgccacggatatctgcgccagcacattggcgcggatggcgctctcgttccacgtggggtatatctcgctggcggccacgcccttgatatagcggggaaaggtgacggtgacgttctccgccggggcgtccggcgcgcccagatggacggtgatgtactccggaataacgggatagggcacggctcagccctcctctcgctgcggcggcagcgtcaccgccagcacggactcgatgcagggaaacaccagcacctgctggtgctccggacagtggtagtccgggtggctcaccgccacggtataggccgttccgctgatgcccgccgtgtccgacgacagtcccagcgacgcgggcagcgccggcagcagtatcctgtcggcaatgccggagctgtcggtcacgccggagtagaacgtctcccgcaccgcgccgaagtcgcggtatacctccacggacgcgccggggatggggaatatcccctgggcggcggatacctgcacccgcaggctgccctgctccgggtgggcattacggaaccaggtgatgggctcgatctgtgccatggtcgttcctcccttttgcttttgggagagtatatgcatcagcagaaaagaaatatcccccggcggcagccgggggatatttgttgtttcagaaggcccagttgccatggcggaacacggggaccacatcgccgttttcgcagacggcgtcgatgtccatatcctcggagccgatcataaagtcctcgtggatcatggagtcattgacgcccagggcgcggcactcggccaaggtcttgtgctcaaagtcgttaatggtgtcggcaaagcccatgcccagggccagatggcaggcggcgttttcgtcgaacagcgtgttgtagaacagcagtccggactggcggatgggactgtcgtagggcaccagggcgcactcgcccagataggcgctgccctcgtccatagtgataagctttgtcagcaggtcgttgttctgctcggcgtgccactccacagccttgcccgcgtggaagcggatccagaacttgtcgatgagctgcccctgatagctcagtggcttggtggcgtagacgataccctcggcctcgccccgcttgggggagatgaagcactcctcggaggggatattggggttgaagacaatgccctgcaggctgcgctcgctgccgccgcagaaatgggcctcggggatcatacccacggtgaagtcggtaccggtggcgctcctgtagcgcaactggcggatgtgcaggctgttcaggtagtcgcggcggtcgtggatgtccttgttgtgggccgcccagttggcctggggatcgccctccagcgcgcgggaggtagagaggatggcctcccacagcttttccaccgcctgagactttcgtaggtcggggaacaacttttttgcccaggcctcgccgggcacggcggcgatgcaccactggtacttgttctcgatctggtcgcggtagggcttgatgatggggaatttggcctgctggctcttggccagcttctcctggtcgatgcccttcaggccgtccgggtcctcggagagcagatagatgcggcagggaatggtgtccacatagtgctgccagcgggccaactcgtagtcctccactctggagagcgtggtcaggctgcggtggcggacgtggagcttctgcagaggctggtagttccagtccaccacgacctttttggccctacacttatagcactcgtccaccagcatggtcacaaactccggctggtccaggtcggcggcgatgaacacctcctgccccttctggatgttgacgccggtgcgggcgatgagacgggcgtaggaacggagaacagactttttcatagggaatgcctccttatcggcaaaatttctgttatgggtattgtaccaccgcgggtgggatttgaaaagcggcagggcgggacgttcaaaaattattttcatttctttaatgttcctctaataaaccggacgtaagataaggctatcctaaggaagcacacaacacatcaacacaaggccatctacatatacaatacggtttcaggaggtaaagaatatgaaacgttttcacatcatcaagaaggcttcccccgtcaactacgcgctggagagcagccgcaccctggacaacggcgtggtgctgaagctgatccactgcggcgagacgctgaccgtgtccgccagctatgaaaagcatctggagagcttcgccgacctgcgctccgtggaggaggcggcgtatatcgaggactatctgacccggaagtacagcggtgtggacgccgccgacctgcccatgctgacggcgtaagggttgtcagggaaaacactttctggtatactgggtgtgagcgagaggtcccgcccgccgatgggcgggcgggatattttttctgctgccggacggtggcttgcggaggagggcacggcgtatgcgtattcttatcgcggaggaccagccggagctgcggcggatgctggtaaagaatctaacggcggcgggctataccgtggacggcgtaccggacggcgcggaggcgctggcgtatctggacgcggccgcctatgacgcggcggtgctggacatcatgatgccgaaagtggacgggctgacggtgctgcggacgctgcgcgcccggggcagcgccctgccggtgctgctgctgacagcccgggacgccgtagccgaccgggtagacgggctggacgcgggcgcggacgactatcttatcaagccctttgccatggacgagctgctggcgcggctgcgggtactgacccggaaaaaaggcagcggcagtaccaacgtctacactctggccgatctgacggtggataccgccgcgcggacggcgaagcgaggcggccggacgctggagctgtccgccagggaatatgcgctgctggaataccttatccgcagcaagggcgtggtgctgtcccggcagcagatcgaggacaacctgtggagcctggactacgccgggggcaccaatgtggtggacgtatacatcagctatctgcggaagaagctggagctgcccggggagcgcaagctgctgcacacggtgcggggcatgggctgggtgctgaaggaggatgcatgaggaacatatccatcaaatggcggatgaccctgtggttctccctgctgatgatcgccatcacggcactgatgctggtgttcgtgatgctgatgaaccgcaacaccgtaacgcggccgccggaggcggagctgctgtacatggtggaccggaacgccgatgatgtggaattcgaccacggagactgggatttcagcgacgtggagcagtacgcccacggggtgtacacggagatcttcgacgaggacgggcagcggctgttcggcacggcgccggcggaggtatcggacggcgcgccgaaggagaaaaacgcgctgcacaccgtcgtcggcagcagcggcgggacgtatctggtgtacgactgctggctggagatcggcggcagcggcctgtgggtacggggcaccatcgacagcgcggcacggggcagcgtgatggaggtcatcgtgccgctggcgtggtcggtgctgccggcgctggtggtgctgagcgtgggcggcggctggctcatctccagcagctctttcaagcctatggagaaggtcatcgcggcggcggagagcatctccggcggcgaggacctgtcgcggcgcatcggcctgcccagaggcaggagtgagatcaaccggctggcggggacctttgacgatatgtttgaccggctggaacgctcctttaaggcggaggcgcagtttacctcggacgccagccacgagctgcggacgccggtgacggtgatcctggcagaatgtgagacgctggagcgtacagcggggaccacagaggactacgtcgagggcatgacggtcattcatcggcaggcggagcagatgtcccggctcatcgggcagctgctgcatatcacgcggctggaacagggcacccagaagacctgcatggagcgcggcgacctggcagcgctggcggaggcggtatgcgagcagcagaaaatgatcgcgccggagggcgtggtcctgacctgcgacgcgccggagagcgtggaggcacggatggacgtgatactgatgacccggctgctgaacaatctcatttccaacgccttccgatacggcagcggcggcggacacgtccgtgtgaccgtccgccggacgggcagctgcgccgtgctgtccgtcagcgacgatggcgcgggcatcccgccggaccagcaggagaagatatggcagcgcttctatcaggtggacgcggcccgcagcggcggcgagggcaccgggctggggctgtacatggtacgccagattgcacggctccacggcggtacggcggaggtggagagcgtgcccgggcagggcagcatattcaccgtgcggatcccggcggaatgacatacattttccccgcctgcgggcggggaaaattttttcatatcccctattgactctgccatggtggaagggtataggataggtacgagctcaaggaaagacgatggaggtgcccccatgctgaagatcggagatttttcaaagctgtcctcctcgccgcgcacctgcgccccctcacgccccccgcctgacggcggggggttctttatgatttgcttaaccgggttgactttcacgggacaggcgggcataatagggcatactatactgatgggaggtgcggtcatggcggacattttcatacgggcgctgcccaagtacgcgccggacctgatcgtgctgctggggctgtatctcctgctgctgggccggtggaaaaagcaagggcggcggcgggtgctggtgtacacggtgttcagcgtgtatatgctgggcgtgctgtgggtgacggttctgccggtgctctccatgctgggaatacaccatgcctacgcgcccatggtactggagccgttccgtgacctgcggctgggatacggcaacgcagagcggcaggtctttctaaacgtgctgatgacggtgcccttcggcattctgtggccggtggtgcgccggggaaaggcaggggtgttccgtacggtgggggcagcgtttctgctgagcctgtgcatcgagctggtccagcctctgctgcccacagcacggatgtcggacatcaccgacctgatctgcaacactgccggcgggctgatcggctacgggctgtaccggccgtggaaaaaggccttgggctgctggatgtaaaaaacgaccgccgaggcggtcgtttttgcttattgcagggcttcgcggaggcagcggaccttttgggccagctgggcgaaggcggcgggggtaagggactgggcgccgtcggacagggcggtggcgggacggtcatggacctccaccaacagtccgtcggccccggcggccacggcggccagcgccagcggctccaccagatcggcgcggcccgcggcgtggctggggtccacaatgaccggcagatgggtcaggcgcttcagcaccggaacggcggacacatccagggcggcgcgggcgggggtcaggccgctgcggataccacgctcgcagagaatgacctgcgtattgccgccggacaggatatactccgcggacagcagcagcacctccaccgtggcggaggtgccgcgcttgagcaggatgggcttgcgggtgcggccgagagccttcagcagggcgaagttctgcatattgcgcgcacccacctgcagcacgtccacatcggccagcgtgtccagctgggcgggatcggtgatctcggtaacggtgggcaggcccgtatcacggccggcctgtaccagcagcgccgcgccctgctcgcccagaccctggaaggtgtagggcgaggtgcggggcttgaaggcgcctccgcggagcatgacggccccggcggcctttacggcggcggcgacggtctgtatctggtatgcggactccacggcacagggccctgcgatcaggcagaaatccgcgcccacgcggacatcgcccaccggcaccacggtattctccggatgagtgctccgggcggccaggtgataggccggggtcaggcggcgggcctcctgcacatagggcagggcctgaagcgcggcggggtccagccgccacgtctcccccaccaggggcaggaggagggatgtctcccccgctacgcagccgcccttgacgttttgcagagccagctgggccagcagctggcggatggcaggctccggggtgttcttttgcagtacgagtatcataacggatcgctccctgtattgtagtcaggtggttattatagcgtatcccatcggtttttgcaatccgtgaaaagcgcatattgacaaaaacaggcagggccatataatatactgtattacaaatgggcgttctgcgtgcccccttccctgccgcagacacagcagaacaaaggagtaaaaaggagaaataatggaacggaaatttacactgagctgctgctccacggtggacctgccttattcatatatggagagccgggacatccccgtgctgttttacacctatgtggtggacgggcagacctatgacgacgatatgggccgcgatccggcggcgctgccccggttttacggctttctgaaggcgggcaagctgccccagaccagccagatcaacgtagcggggtatatggacttctttgagcgcctgctgcagaagggcggcgacgtgctgcacatcgcgttcacgtccgggcagtcctgctcggtgaacaacgcctatctggcggcagcagagctgaaggacaagtaccccgggcagaagctgatcgtcatcgactccctgtgttcctccagcggctacggcctgctggtggactacgccgccgatatgcgggacgcgggtgaggacatcgacaccgtggcccagtgggtgctggacaaccggaacaaggtgcatcaccagttcttttccagcgatatgacccagttccggcggacaggccgggtatccggcgcggcggccacggtagccacggtgctgaacatctgccccatcatgcggctggacgacaagggcgccatcaaggcatacagcaaggtgcggggcaagaaaaaagccgtggagactacggtagacaccatggagcagcacgcccagggcggccgggactatgacggcaagtgctttatctgccacagccagtgcccggaggacgcccggctggtcatggacgccgtggaggaccgtttcccgaagctgaagggaaaggtacgcctgtgcgacatcggcaccatcatcggcagccatgccggacagggcaccgtggcggtgttcttcatgggcgacgaacggccggagatggaataagggaagaggcaggaatggtcctgcctcttttcgttctcttgggctttaatccgcatagccaataatatctctttccaccgtatgtatcacctcttcgggtacatctttcacgaataatctataaacccggttcaaacgcggattatatatcccaaggtattcaattttttcaaactccggatgtacagagcgaagccccatcctccagtacataagcaactgcaaggtgtgtctcgtcgttattgatgcagaagtaaccttaaagtcccacaaagtatcctccgtaatgaaatctccatcgcctgcctgcactatatcggtatatccgccctcgaatgtgaatccctccaaaattatcggaccatactcctcgacaaacttcaaagaccgttcgaccataatccgaacatttcctattgttgacttatcaaccaatatccagtcaacgctgagtaaacagaaagagacgcgctgcggcgcgtctcttttttgctcttttccttatcttccggtcatgacggtcatgacctcgaactcctcgtggttcagggtcttggtcatggccaggccctcatcaatgtccacgttgctgatccggtcgcccttggcgcagacgatgcggttggtcttgccctccgccagcagctgcaccgcctcgtagcccatgcgggtggcggtgacgcggtccttggcggtggggctgccgccccgctggatgtggcccagaatggtgacgcgggggtccagccccagctcctttttgatctgctcgcccacggccatgccgctggcggcgccctcagccaccacgatcataaagttggttttgccgctgatgcgggcgcggcggatcttctcagccacgtgcttttcaaagtcgtaggggcgctcgggcaccagcacggcggtggcgccgatggccacgcccacatacagcgccagataaccggcgcggtggcccatgacctccaccacggagcagcgctcgtgggactgcatggtgtcgcggagcttgtccatacactccacggcggtgttggccgcggtgtcgaagccgatggtgtagtcggtgcagacgatgtcgttgtcgatggtgccggggatacccaccacggaaacgccgaacttggacaggtcctgcgcgccgcggaacgtgccatcgccgccgatggccaccaggccgtccagaccgatgagcttgcaggtggcgtaggccttctcctgcccctccttggtgcggaactcgtcacagcgggcggagtacaggatggtgccgccgcggttgatgatgcggctgacgctggcgttgtccatctcgacgatgtcgccggagatcaggccctgatagccgcggcggatgcccacgcactcgatgccccgggcgttggcgctgcggaccacggcgcggatgcaggcgttcatgccgggggcgtcgccgccgctggtcagcacgccgatacgtttgactgcgtttttcatacgctattccctcactttgtcaaggggcggtgcccctgaatatgcaggcatattgtaccatacgtttggtctgttttcaagtccttcggcgagccgcggcaaatttttgcctgtacagtccgtcggttttgtggtatcatccctatgataaacgaaaggagcgaccgtcatgcacccacaattcgcagaattgacgcccaactggttcaatcgggcgttcatatacaccggctccatcggggagttccgctaccgcttcgatggggataaggacgcgggaatcctgcacaccgctgtatacagcaatgtgtgctacgagctggcgcaggacaaggaggaacgggatttcacctgggacgaggcgggcgtggaggcgctgaaggcctggctccaggaaaaatatgaggcatactgcacggcacagaaatgacaaaagcaccccgcggggtgctttttttgcgtcagtcacgccaggtgctgcccaggaacagcgccagcaggggcatcagctccagacggcccatgagcatctccagcgacagcaccagcttgctcaggggcgagaggatggagaaattctccatggggccgaggatgcccaggccggggcccacattgctgatacaggtcagtgacgcggcgaaggactcctggaagccgtagttgtcccagctgaccaccagtgcgcccgccagcaacaccagcaggtatgccgcgataaacgcgccggcggaggagacgacccgctcctccacggcctgtccgtccaccttcagcacgctgacatggtgggggtgcgccagccgcttcagctcccgcttcaggctcttgcagagaatggcgacgcgggatatcttaatgcctccggaggtggagccggcgcaggcgccgatgaacatcagcatcaccagcgccatgcggcagaaggtaggccacagggagaaatccacggtggcaaagcccgtggtggtgatgatggtaacagtctggaaggcggcgtcggtgatggaatccccgaaggggattcccgcctgcacccgcagattgatgcacagtagcagcgtggccgccgccacgataccgacgtagatccgcagctcctcgctgcggagcacctccttcagcttgccgcgaacggccaaaaacatcagggagaaattcacgcccgccaggaaggagaacaccgtgacgatccacatgaccgccttggacgcgcccgctagggaggtatcataaatcgagaagccgccggtggccatggtggtaaagctgtggcagacggcggagaaccagctctcgcccgccagacgcagggccagcacctcgcagagggtcagcaccacatagatcagatagagtatcttggcggtgccgcccaccttgggcaccagcttggacttgatggggccggggctttcggcgcgcatgaggaacactgcgccctcgcccatgcggggcgtcagcgccaggaacagcaccagcacacccatgccgcccatccactgggtcagcgagcgccacagcagcacgctgcggggcagatgggacacagcggtgaaggtggacgagccggtggtggtcaggccggagaccgtctcgaacagggcgtcgatatagctgtccagaacgccggtgaacacatagggcagcgccccgaacagggacagcagcacccagctgagcgccacggccacgaacccgtcgcggctgtgcatctgtgcctttttcaccgggatcagatgcagcaccgtgcccgccgcggcacagagcagcgccgtcagcagaaactgctgccagcaggtctcggcataaatacaggccgtcagtgccggcagcagcaggaagcctgcctcgacccacaggatgtagcccattgtgtgtgagagcaatcgaaagttcatagaaaatacctcaaagaaaaggtgaaaagccttcgggtattatataaccgcgcgggacgggtgtcaacctcagtccagcttgccctccagtgccgagaacaaggcgggcatatccacgtccttgccggtgaacatcttgaaggcacgggccgcctggtagagcagcaggtcgatgccggacacggtgggcaggccgcgcttttcggcctcgcgcagcagcatggtctgccggggattatagaccagatcgtagacggtgacgcccgccggggcgtcacgcaggaagcccaggtcggaaaactccttcatgccggccatgcccagagaggtggcgttgatgaacaggtcgctctcggccatggcgcggcggacggggaaaatgccgaagtagatgaactgcgccttatccgggtaacgcgcggccagatcctgggccggatagacgctgcggttggtgacaaatatctttttaacaccggcgccgaccagcgcatcacagatggcgtctccggcgccgccggtacccagcagcagcacggtcttgccctccggctccaggccgcgggcgcgcaggctgtccacaaatccccggccgtcagtgttatagccgatggcacggccgtttttgatgcagacggtgttcaccgcaccgcaggcggccgccgcagggctcagctcgtccagcaggggcaggatagcctccttgtggggcatggtgacgttgaacccggcacagccgccggccttggcctcggccacgaagtcggccagatcgcggggctgaacgcggcggacttcataggtgtagtgtgcgccggtctgggcgatcatggcgccgtggagcagcggcgaaaggctatgatccacggggtcgccgataagatagagctttttgttggtcatacaaatgcctccccagtgcagccgcaggtgggcgcagccgcagtgttattggtgtgttggagcagatagtccatggcttcgagatagccggcaagtccgtggccggtgatgactctaacgcaggccggcgcggtgacggacacggcccggaagggctcgcgggcgttgatatcggaaatatgcacctccaccgccgggacgggggcgcagcgcagagcatcatagatggcgtagctgtaatgcgcgtaggccccagggttgatgacgatgccgccgaagccggcccgggaggcctggatagcgtcgataagcgtgccctcatggttagactggaacagctccacctggcagcccacggcggcggcgtgctcgtaaatcagtttacataaatcgtcatagctctgtctgccgtagatgtccggctcccgctggcccaacaggttcaggttggggccgttgaggatgagcagcttcatggcgtatccctccatagtcgcagaataaagtccttcatttggtcaacagtgccgtcaggcacccgataatgggcgcaggccgcgtacagcgggcagcggacggcatacagggcccgcagggccgcctctcccccggcgagcagcggacgtccggcggcgtaatcagtcgacataatattatccaccgtccggtccagccagaacaccgtgccgcttcgacgcaggagctcacggttctgctccgtcaacaccgcaccaccgccggtggcgatgacgcagggtatttccgtctctgtgcagagcgcttccagcgtccggcgctccagggcacggaaggcagcctcgccctccgcggcgaagatctcagggatggaacggcccaccgtctgctccgtcagtgcgtccgcgtcgtaaaggggcacggacagcgcccgggacagggcggcgccgatggtggtcttgccgccggcgggcataccgataaggatgatccgccccgtcatgcctgctcctcccgggagagcgccatcagcagggtcatcaggcgctccgcctgatcgcggcgctccggcagcatatcgccccgggtacggaggacttccgcctcccgggccttatcccggaccggcagaccgtgggcgctcttatacgcgccgatggcggcagacagccgctgacggcggtcaaacagttccaggatcgccgcgtccgtctcgtccagccgttgacgcaggccgttcaggtcggagggaacgtccggcagcagctggcacaccgccagggcggcggcggactctaccgccggggcggcgcggagcgcgatgcaggcgtcatggcgaccggggacggagatagtcgtctccgtcatggtagtcaggtccacggtccgctgttccttagcgatagacggcgtggggcggaacgtcacatcgaacaccacgtccataccgttggtaatgccggcgttgacgccgccggaatgattgctcactgtgcgaacagcgccatggaccaccgtaaacgggtcgttggccgcactgccgcgcatctgggcgaaggtctcccccgcgccgaagccgatggccttgacagcgggaatggcaaacacatggcgggcgatggtgccctccacggtatcccgccagtcagggccgcccaaaccggcaggcagaccgctgacggtgcagcggatcacgccgcccacactgtcgccgtccgctttggcagcggcagcgcgtgcccgcagagcctcctcatccaggacctccgcgtgaacggcgatatggaccgtcttcaggtacgtgatcgccagcgcgccggccacggtcagcggcgcggtaagccgcccggaggtatggccgccgccccggggatcgttgcagcccagggcgcggaccgcagcggtgtagtcaccgtgggagggccggggcttgtgtttcaggctgtcgtagtcagtggaacggacatcaccgttgtaaatgaccgccgccagcggatcgccggtggtgcggccccgatagacgccggataggaagtgcacttcctctttttcctgccgggcggtggtcagcccgccctgccccatgcggcggagcagctgttcacggataaaggcctcgtccaccggcagacccggcggcacatccgtcagcaggacacccaccgccggaccgtgggactcgccgaaaagcgtgtagtgcatcacgattccagcacctcccagtttccgcccagggcggcaagctcacgccagaaggcggggtaggacttcgccacagtctcggcgccggacagtgtcacgggaccgtcggccaccatagcggcgcagcccgccagcagagcaatacggtggtcgccacaggcagagacctccccgccgtgcagcgcgctcacgccatggatgatcagcccgtctggctgttctttcaccgaagcgcccagcgcgttcagcacagcggagacggcggtcaggcgatcactctccttctgccgcaggaacgcggcgtgggtaaagcgggtatcgcggcccgggcgcagcgcggcgtacagggccagcggcggcaggaggtccggggtgtcggagatatcgatctgctccggcagcttgtccagatagcgcaagatggccgcgtcgccctggagatagggcggcggcgccaacgggatacgaagagcctctcttctctgtctgggaagcagggcacgcagcaccagccaataggccgcagcggaccagtccggctcatccaacagcggcgcggggcgacagaactgcccgccggggatatgccagccatcggtgattttctccacggtgacgccgtggagagccaggaccgccagagtcatctgcacatagggccgggagacggcctctccggtgacggtaatgtccgagtcccccggcagcagcggcagcgccagcagcataccggagatcagctgggacgtctcatctcccggcagcgaccagtggcccgctgtcagcgggcgggtcagggcaaggccctgctccgtgcgccgcaggcccagatccccggggataggacgggagagcagccggtcggagccggtgaacaccgcgtcggtgcggccaagggccatgaacagcggcagcaaaaagcgcagggtgctgccgctgtcgccgcagtccaccagcggcgccggggcggtcaggcaggccagtccccggtaggtcgccagcacatcctgtgccgcgtggggcggcagctccgtgacctggcccgccagaaaccggcagatcagctcgcggtgcagcaggcttttggagggcggcaccgtgacggtgccctgcagagacgaaggcgtcaataacagcttcatgctttatcctcccataaatcggacaggggcaccgtcaccagttcaccctgtcccatgcggcggacgatgaccagctgcaccgtaccgccggcggtttttttatcgtggcccacgcagcggcgcagggccgcctcgtcacagtcgatggccgtgggcaggccgtaccgcgtcagcagcggctccagccgtgccagcacatcggtgccgccatagccattggctatctgccagcgaagggtacggcacatcccggcggccacagcctcgccatgggtccaggtgtcatacccgccgacagcctcatagccgtggccgaaggtatggccaaagttcagcaggcggcgcgcgccgtggtcctccgcatcaccggataccaagtgcagcttggcccgtccgcaggcggcgacaagggccgtcagggcctcgccgctgtcgctccgcaggccctgctcggcggcggccagcagggcggaatcggccaccagcccggtcttgatgacctccgccatgccggaggcaaactgccgctgcggcagcgtcgccaggcaggcagggtccgacagcaccagagacggctggtggaacgcgcccagcaggtttttgccttccggcaagtccagagccgtcttgccgcccagggcgctgtccacctgggcaagcagcgtggtggggatatgggccaacggcacgccccgcagcagcgacgcggcggcaaagcccgccgcgtcgccgcaggcgccgccgcccagcgtcaccacgccgcaggaacggtcaaaaccgctgtccagtatccggcggcatagggacaaccatgcctccggcgttttggcactctcgccctggggcagcgggaacagcctcgattccagtccggcggcacggaggctgccctgcacccattcgccgtagaaggcggagacggcctcatccgccgccagcgcccagcggcgcacctgcggcacatgctgccgcagcagcgcgccggcgcgccccagcacaccggcgccgatacacaccgtgcaggtcgcgttgttcagttggacggtaaactgttccatagacttcctccgcagccggccggccattgtattcagcaaagcgactcccgcttgcaatcaaatccttgtcaatcgatggtaatatcaacacctaatataatgcaaattcatcaacaaatctatcgtatatattgtatcgcagcatggcagtgtttgcaataaaaaagcgaaaaaagccgccgcacagcggcggcggaaaaaacaggcccgccgccggagagcggtgggccgtatgtgtcagtcgtccagattattcagcttggagcagcgttcgtattccacctgcatgacggaggccacagtgtggcggccgtagtcatccagcttggcgtactgggtcagcagctgctcggtatcatcggtcagatagaaggcggcgtcatcggccatcgccttgatgcccagcgtcttgcagatctgcatgacggtatcgaacgaagaaccgccgacgccgttgtggagggcgctgttgatggtggacaggggcacgcccaccgcaaaggcaaactgccgcacgctccggtactgccgcgagatctcgtcacgaacgatggtagtcagattatccataatacgtcctccactcatgtataataatgataaagtgatttcctataatttccatttatgcttacagtattatagcatgcttttcacgtttcgacaacctgaaatgctttttttaataaaaatttcatttttccggttttttacgaaaaattgagcccggtcgggcagaaacagccgtgccgataaattatgctttgattttaccaacaatcatggtatactaaacatccgaggtatgttgatatgagtggtaacaaaaaattcccccgcacccacgccggtcggctggccgccgacatggtgctgcggtactatacccacgacgtagcccgggacagcgcggcgctgacgtattatctgctgttcgccatctttcccctgctgatcttcatcagcaccctgctgggtctgctggagctggacgtggcgtatatcacctccgtactggagccgctgctgccggcagacgtggtggatgtggtgcgctcatatctggagtacgtctccgctaaccagagccgtcagctgctgtggttcagtctcatcttctccatctggttccccatgcgggcctccgggtgcctgatgcactcgctccgcaaggcctttggccgcagcgcgccggagagcttgtggcgcagccagctgcggatcctgctgttcactgtatggctgatcgtcgttatcgccgtgacgctggtgctggtggtggtgggacggtccgtgctggagtttgtcggacggttcatcaccatcaccgactcgttcatcaccgcgtggagttccctgcgcttcgtgctgctggcggtggtcatggctatcacgctggtaatcttgtatatgctctcccagggccagcgccggccgctgcgggaggtgctgcccggcgtgggcggttcactggtggcgtggatggtgctgagcatggcgttttcgtactacgtagagcacctggggcgctactcggtgctgtacggctccatcgccacggtgatcgtggtgctgctgtggctgtatatgtcgggacagatactgatactgggcgcggagttttccgccgccctgctggaaaagagacagaccgccgccccctcgggcggagaggaggacgcatgaagatcatcatcgtaggctgcggcaaggtgggctatgccattgcccagcagctgacccaggaaaagcacgacatcacggtggtggacgatgaggccgcccacctgaaccgtgcggacagcacgctggatgtgctgtgcatccacggcaacggcgcctccatcagcgttctgatggaggccggagcgcgggacgccgacctggtcatcgccgtcaccggcgtggacgagacgaacctggtgtgcgcgctgatcgccaaaagcgtgggcgcgcagcacaccattgcccgggtgcggaacccggaataccggcgggacgcggatatgctcaagcgggagatcggcctggatatggtcatcaaccctgacctggccgcggcgcaggagatcgcgcggatcctcagcttcccggcagccatctccgtggagccctttgccggcgggcgcatcgacatgatcggctttcagctgcacccggaggataccatcctcggccgcagcctcagcgactttcaccgggagcgcgtggcagaggtactgatctgcgccgcccagcggggcgatgagttcatcatccccaacggcgccttcgtgccccagctggaggaccggctgtacatggtgggcagcaaggccgagctgcacaaaatgctcaagagcatgggccgcagcctccagcgggtaaaggatgtatctatcctgggaggcagccgaatcagtatgtacctgagctgggagctggcacgggccggcacgcgggtccatgtggtggagcaggaccatgataagtgcctgcggctgtctcaggacctgccgggcgccatgatcatcgagggcgacggcacggacatcgacctcatcaaatcggaaaacctgttcggtgcggacggcttcgtggcactgacgggccgtgacgaggaaaatctgctgatggccctggccgcccgccgtgccggtgtgcggaaggtgctggcgaaaatgacccgtcccaactacatggagctggtacaggagacgggactgggcagcatcatcagtcccaaggatatcatcgccaaccagatcacccgctacgtccgcgcactggccaactcgcaaggcatggcggtggagtcactgtacaagctgctgggcggcaaggtggaggctctggaattcactgccagcaacgacggcaacggcatactgcacacgccgctgatgaagctgcccctgcgccacggcgtcctgctggccgccatcgtacgagagggccggacgatcatccccggcggcatgaccaccattgagccgggagaccatgtgctggtggtgaccaatgtacccggtctgacggacctgaagaacattctggcataatgaaaagcccccatgcggacgcatgggggcttttcggatacaagagaagagggcggccgacgccgccctctttccgcacgctattttttctacgcacccagcagcttgtgccaggtatcacggcccaccaagccgtcagcggcaatgccccgggatgcctggaaacgcttgaccgccgcggcggtgttggtcccatagataccgtccgccccgccggcgtcgtagcccagtccggtcagcgccgcctgcacacagcgcacggtatcgccgcggctggcggtggtcagcaatggcagcgtcagcgtcgtgccggagaccaccggcgccggcaccgcaggctttgcagtctgcgcgcccgccagggcatcaaaggggaaattgtccccgggacagccggtggcgttcacatcgctgtggcgctgaatggtggaaatgccgtacttctgcttcaggtatgccaccagctcctgcccagcgcgcagctgggcgtcaggcatggtctcgcggtcaaagctgccctcgaagcagatgcccaggctgtcgtagttattgttcccggcgtgggcgcccacggtgtcctccggacggccgcgatagacggtgccgtccttgcggatgaaaaagtgatagccgatccccgtccacccgttggccaggtgccactgatggacctgctgcggcgtacacgttaccgccgcggcgtggtgcaggatgatgcggcgggtggccgtccgtcgggccaactgacccgcccacttataggcaacttcattgatctgcattttggtccccctcccctgcttttgtttctacggcgactttcagccgcgtcagcagcttgcgtaaaaagcccggcaccgggccgcccagcgccgccacgttttccaggatggagatcaattcgttgatgatgagccagacgatgaccatcgccgccatcaggaactgaaagctgacctccacccccacctgggtcaggccgtaacgcaccaaccagtccaccacaccggctacacccaccagcaccagatagcccaactttttcaggataccgcgcaggccggttttggagcagagcttgcccgcgctccaggcctttgccataccgctggcatagtccgccagcattacggcgatcagcaccgccagcggcaccaccagcgccgaagcgtagctgcacagcgcacccagcgccgccgccagaattgccataacagaagtttcgtttttcatcctttgtgtcctccccacacattattcagcggcaccgttacagtgtatgccgtcctattatgcggggtgtttttctccggtgttgcacaaaagtggacaacagaaaggcaggcatcttacgatgcctgccttttgtccgtgcgtccccggggtgtgggccgcgcggcccggtatccattcaagatatggctcaatagctgcccaggtcggcgctggcgtcgccctcgacgctcttgccgaactcgtagtcgttgccgggcaggacggcgttcaggatcacgcccgccagggcggcgatggccaggccggtcagtgtgatgtcggcactgcccacggtgaaggtgatgccgccggtggaggcgaagcccaggccgcagacgaagatgacggcggcgatgatcaggttgcgggacttggtcagatcaacgcggttctccaccacattgcgcacaccaacggcggagatcataccgtagaggacgaagctgacaccgcccacgatggcagtggggatggaattcaccagtgcgtcgaacttgggggagaagctcaggatgatggcgtacagggcggccagacggatgacccgggggtcgtagacgcggctcagggccagaacaccggtgttctcgccgtaggtggtattagcggggccgccgaacataccggcgaaggcggtggccagaccgtcgcccagcagggtgcggtgcagaccgggatcctcgatgaagttcttgccggtggtggaggagatggcggacatgtcaccgatgtgctccatcatggcggcgatggcgatgggcgccatgaccaggatagaggtcacatcgaacttggccaggacgaacttctgcagacccacgaagtcagcgccggccacctcggtgaagtccaccttgccggcgatcagcgccacgatgtacgcgcccaccacgcccagcagaatggggatgatcttgaccatacccttaccccagatgttggcgacgatgatgatggcgatagccaccagagccagccaccagcaggtggaggcgttggccacggcggtgccggacaggttcagaccgatgaggatgatgatgggaccggtgacgatgggggggaagaagcgcatgaccttcttggcacccaccagcttgaacagcagggccagcaccagatacagcagacccgcgaccaccacgccgcccagcgcgtagggcagcttctcctcgccggtcatggcggcgaacttgccggtgttcagaccagccaccgcctggaagccgcccaggaaggcgaaggaggagcccaggaaggcgggtaccttaaacttggtgcagacgtggaacagcagcgtgccgataccggcgaacagcagggtggtctggatggacaggggcaggccgtagcccgtcaccaggatgggcaccagcaccgtagcgccgaacatggcgaacaggtgctgcaggcccaacaggagcatccggggcacgcccagctcccgggcgtcgtagatggcatcgtgtcctaatttcttgttcatgtgacttgtcctctctttctcgttcatccgtatatgtttacttacttacaaactgcctgaaaaaatgaccggtgaaaaatcaccggtcaaatggaaacaatatcagaaacaaaaacagagggagcgccagtccgctttttcacgatcgtcttgcaggtcatggcgtgtccctcctctcattttcttgcctattatacggggcacagccgcaaaatgcaatacacttctgtgccaatatcctgtcaaaatttcagaagatgatttggctgtattgcacaaggtcattcgccacgcttatcgctgccatccgccattcttaaccgccgccgcaaaatggggcatacgcccgccgccacgacgatcttcacggcgtctcccggcagatagggcagcatccccgcccacagcagcgcggaaaacgtcatacccttgcccatgtaggcgttgagtatcaaggccatgtagggcattcccacggcgtacagagcggccagtcccgccagcgacgccagtgccatgcgtttggggtccagactctcccctgccacggcacccaccacccatgcggccgggatcagccccagcaggaacccgaacgtgggctggaacacatagccaaagccgccgcccatggtgaagatgggcaggcccaccagccccagcaggacgtacaccgcctggctcaaagcgccccacctccgacccagcagcagccccgccatggcagtgaacaggtattgcagcgtcacggagctgtacaccatcggaatacgcagaaacgcacccaccgccgtcagcgcggcgaacagggcggtatagaccagcttgcgggtacgggtgttcataggcgtccctcctccaaaaactgtcctgatgatactaaattccttaacacctgtcaactatttacaaacgcggaatacagtgctacaatgtgttttcgaccgaaaggagatgatggccgtgacttgggatgttctgcgctatgacaccgtggactccaccaacaacgtatgcaaggcccttgccgcgcaggggctggacagcaccgccgtcatcgcccgggcgcagaccgctggtaagggccggctgggccgttcgttccaatcaccggagggcggcctgtatctttccgccctgtggcaggactgcccggccgggcagctgctcaccgtgacaccgctggccgcggtggctgtgtgccgcgctgttgagagcctctgcgacacggactgcggcatcaagtggtgcaatgatgtggtgctgcacggcaaaaagctctgcggcattctgaccgagtcctccctgctccctgacggcagtgcggcgtggctggtggtaggtatcggtgtcaatgtgggacaggcctcttttccgccggacatcgcggacatggccacatcccttgccctacaagagcttgacgtgtcgccggacgcgctggcagacgccatactggcccagctgacagccatgcggactgtgctgaccgacccagtggaatggctggcggaataccggcggcggtgcgtgaatttgggcagacccgtgcgcgtcctgcgaggcaataccgtccggcaggccacggcgctggccatagacgaacagttcggcctgacggtgcagtatgaaaacggcgaaacggagacagtccgcagcggcgaggtctcagtgcggggactgtacggatatatagaatgaggtgatacgagcatgaacacaaaacttctcgctcagttgttcctcacctttgccaaggtgggcgtcatgaccttcggcggcggtatggccatgctgcccatcctccagcgcgaggtcgtggaggacaagggctgggctacagacgaggagctggtggactattttgccatcggccagtgcacccccggcatcatcgctgtaaacaccgccaccttcatagggcagaagcaggccggtattatcggcggcatcgtggccacgctgggcattgtgttcccatcgctgatcatcatcactgcactggcaggcgtcatcaacagcttctcccatctggcttgggtgcagcacgcctttgcgggtatccgcgtatgcgtgtgcgtgctgatcttcaacgcggtggtcaagctgttcaagggctctgtgaaggactgggccgccgggctgatcttccttgctgtgctggcggcggcgctgctcaccgacctgtcccccgtcatcttcgtggctgcggccgcggcgctgggcatcgtcattcagaacgtgataaggagggcgaaataatgctgtacctccaactattctgggaattcttcaagaccggcctgttcgccgtaggcggcgggctggccactctgcccttcctgcaggatatggcggaacgcactggatggtttacccatgcccagttggcggatatgctggcggtgtcggagtccactcccggccccatcggcgtgaacatggccacctacgtgggcttcaccaccggtggcatcggcggcgcgctggtggccaccatcgggctggtaaccccctctgttatcgtcattctcatcgtggcggcgttcctgaaggcctttcgcgacagcaagtgggtcagcgccgcgttctgcggcctgcgccccgcctccaccgcgctggtggctgcggcgggcatctccgtagtacctatcgccctgctgcacagtggtatgaccggtctggccgtgctgaactggccggctatcgccctggctgcggtgctgctggtgtgtaccaactgggtgccagtggtaaagaagtggcaccctatcgtgttcatcggcatttccgccctggtgggcgttctgctgaaattttgagaaaagggagacgctgcgcgtctccctttttgtatatatttcctcccggcagggcagactatcgctgctatactgtcaggaggtttgtattctatgtctgaaatgttctgttttcagtgtcagcagacggcgggcaacagcggctgcgtccgcaccggcgtctgtggcaagcagccgaaaaccgccaatttgcaggactatctggtgtgctccctcatccacctggcggagatatatgccgccaaggaggactatcctccggaagtcacacacctgctggcggacggtctgttcgccacgctgaccaacgtaaattttgacgatgcggccctgcagggttatatccgccgcgccgaaaaactgacgccccagcgtctgccgatacaggacccgagttggctatggcgcggcgatacggacatcgtgtctctgcgcgccacactgctgttcggcatgaagggtatggcagcctatgcccatcacgctttccgccttgggcaggaggatgaggcggtcagccagtggttctacaaggggctgtgcgccctgcggcaggagcacaccgttgaggagtggctggccctcatcacggaatttggtctggtaaactatcaatgcatggccctgctggacaaggccaacaccgccgccttcggtgacccggcgcccgcaaaggtccacacggacatccgtcgggggccgttcatcgtggtatccggccatgatctggaggacctgcaccagctgctggagcagacgacaggcaccggtgtcaacgtgtacacccacagcgagatgctgcccgcccacgggtatccggggctgcgaaaatacccgcagctggccggaaacttcggcaccgcctggcaaaaccagcaaagcgagttcgacagccttcccgcacccattctgatgaccaccaactgcatcatgccgccccgtcccagctatgccgaccgtatctataccacgtcggtggtgggctatcccggactgaagcacatcccggaggaccggcagggccgcaaggatttctccgccctcatcgaccaggcgctggccctgggcggatacagcaccgaccggagcatgagtggcatcaacggcggacatatcctgaccaccggctttgcccacaaggcgctgggcgacagcgccccggcggtgatcgacgccatcaaaagcggcgcggtgaagcacatctttctggtaggcggctgcgacggcgcgcaccccggacgcaactactacacggacttcgtcaagtccacgcctatggactcgctgatcctgacgctggcctgcggcaagttccgcttcaatgacctggatctgggcgatatcaacggcatcccccgcatactggacgtaggccagtgcaacgacgcctacagcgctgtgcagatcgcgctggccctggccgatgcctttggctgcggcgtcaatgacctgccgctgacgctggtgctgtcctggtacgagcagaaggcggtatgcatcctgctgacactgctggctctgggcatcaagcgcatttacctggggcccaccctgccggccttcctgtcagagacggtggtcaagacgctggtggatacctatcagctgcagcccatcacccatccccaacaggatctggacgccatactgcaccgcggataaagaaacatcccccggctccgccgggggatgtttctttatccaagcacctctgccaggccgaccaataccggcatggtcaacgcggagatcgccgtctggaccgacaccagggacgaggtcagggcggtgtccttgccgaagcgggcggcgaacatactcagcagcgccgccggcggcgcgctggccgcgatcagcagcaccagcgtcaggtcatgggacacgttcagcgccaggcagatgcccagtgaggtaagaggcagcaccagcagccgcagcaccagcgtcacccaggagctgataccctgcagcgccgccttgaaattggcgtggctcagctgatagcccaccaccagcatgggcagcggcgtattcaggtccgccagatagttgatggggaccatcaggggttccggcaccgtcacctgcccgagatacagcgccatagccagcaccacgctgataacgccggggttcagcagcaggggcttcagcagcagctggctgcggtcgcctgtgatgacatagacgccccatgtccagctgagtatagtaaatacgatgacgtaggccgaaccatagaacacgccgatgctgcccagcagcgcggccatcaggggatagcccataaagccgcagttggagaacactgcggcgaagcgcaggcagttctgccgttcgcggtccctgtcgtggatcagcagcatggccgccgcaataaacaccacatggagtacggccgagacacccgtcactacgccgaagttgtgcagtgccgtatgctccagcggccgttgaaacgccaccaccatcatacagggggacaccacgtacatgaccaggctgctcagggccaccgaggcgcggtcatccagcagcttgacctttcccagtacaaagcccaccaccagcagcaaatacagtgtgagtatctgctgccccacggtgaggaatgattgcagcacggctatccctcctaagcaaaaaatgcgcaccgcctcagtgtatcacaaaaaatcccggtgtcaagtccccgtgaagaagaaaagcggaagccgccgcttccgtttttcttacagatcgttcttatcccggcccacggacttttccgtggaaaagccgtctggataccggtgctccagcttctccaggttggcccggaggatatccttcagatcaaggtccagcgccgtggccgcctcggccagataccaggccacgtcccccaactccttggccagatgctctcggtccagcggatggccctgggccagccacttcttcacgatgtcgatggcctcgccggactcgccgcacaggcccatgacgctgttgataagcacatcccggcccttcaattcgggatttagcgaagccatggcccgctgctggtattcgttgatggtcatcatgccgtaccctccaacaatgccggtatctgccgcagatccgtcacctgccaggtcacatccgtaccctctgccgcgccggggcggcggtagtaacaggtcttcatgccatactgccggccgccggccatgtcggaggtcaaggagtccccaatgatcacacagtccttcggcgcgatggccgcttcacatccatcgttcagtgctgcaaacgccccatcgaaaaaggcccgggccggcttggacgcacccagtctctccgacacgaagaaccaatcgaaataccgcttcatgcccgccagctccagccggtggagctgctgatcgtatggtccgttgctggccaccgccagcggatacttgccgtggagcgcctccagcagttccatggccccgtccacggggatagcgctgtcgtacagggccgcgcggaaatacttttcgaatacctgtccgtcaaaatcgatattcagtgctcggaacacgttgttccagcggatctcttccagctcacggaacgtcagcgtgccctgctcgatctgccgccagagttttccgttctcccggtggaacacggcctccatgtacggctcgtagggcttcagtccaaagtgcgcgaagccctcccgcatggtctgccggatgtaggcgtcaaaatccagcagggtgttgtcgatgtcgataaaaatcatctgcatggggtacctctcagataaagaacttacggtgcaggctgcgccgcaggggcttgcacatggcgatgaccagcagcatggcccccagcaccacccccgccgccagcgggtagaaggaccagaggaacgtctcgtgcaggccgaaggtcaggttcagcagaaactccaccaacaccgccatgccgccggacaggatcagcgccccgccgcagatgtacagcgccgcgccgggcagataccgcagcagcgtcaccatggcgcacaccagcagccctgccgcgcctgtgaccggcagcgcaaaggtcaaaaaccagtggcctccggtggcgtagttcacatacagcaggaacacgccgatggccgcgaagtcaatggacacgaagatcaccgggttgggccgcttaaaccacagaggcagcaccgccaggatatacagcagcagcaatccgcccacggcaaagccggaccagacgatggtcccgttgatgcgccagtcgcacagcacggtgatgaccgccggcagcagcatacacacagagatgacgaacagcacgccgattcggctgacctcctcgtggcggggatggtcagccggcgggtagggcggctcaccctgtccgcagggcagatcgggatgaaatacccgggtgccgcacaggggacaaacgcgctcgctgtccgccagctccacgccacatttgatgcaatacataagaaaggctcctttctcccgttgtgtcagcgcatattgctctcgaccttaacgggcagtcccagccgatgcagcacgcggtagaagtgatactccagctccggctcccggatactgcggatacagttgatataggctgtatccccccaggtgaccacgccgcagttgtggggtgccttggcctgcacaccgatgatgaagtccatccggcgcacatagggcaccatcacgtccggcagttccacgcggcccaggttggacaggcacaagcaggacttacactcgcccaccgtgtcaaacacggccttcatggcgatattcttgatgaacagcggcatgacccgcagcacgggcgaacgttcgctggccacattggcggcaaacttggcccgcatagtccagcggttgttctccagtcccatcttgtggtgcaccaaggcacacagctcctgaaagctgcacgcccccagccgcggatcgatctccggggtaatataggacgcaaagttccgcagcgttttgctgggaaacagctttcgcagatttaccggcagcagcaccttcaccggcttacggtggcgggggttgggcaccttctccgtctgcagctccagaatagcctgcatcatggcggcacacagcagctccgtcacggacacgccgtggtctttggcgcaggaacgcagcttatccgccggcaccatcagtgtcaccaggtccttatagccatctgtctccggcgtgccggtcaggtgccaggccgtggcctcggcgcggctggcggtcacatccccagcataccgggcaaagctgtcctccagctcctccggcgacggctcctctaaccgtcccagtacgcccttttccgcagggacggagataccgtacttctcactgagatattccgccagcagtgatttgacaaacaccagtgcgccggtgccgtcggtcaacgcatggaaaaactccaccgcaaagcggtccttatacaccagcacccggaaggcgcactgccgcacctggcggaacggcgcatgggccagcgggcagctcttttcgtcctgtatgggcggcgtgtggggtatctcctccagatagtaccagaacacaccccgccgcagccgtacggcaatggacgggaaacgccgcaccgtcacatccagcgccgctgccagcaccgcgcggtctaccggctccgccagcgtggcggagatgcggaaaaaattgttccagttgcgccgcttggcagcgggatatatcttggccgcgttgtccagacgcatccaccgcaggctccgggccggggacaggttctgcgtcataaagcggttgatctcatagatatcctgctccatgttctcctgcaggcaatagagcacataggcgtgccagcgccccggcgcgatgatcagcctgcttttgctcccggcctttttcagccgttcatgcaatccccgggcgtcatccagcaatatctcatcgccgccggcgaagatcagcgtcggcgggaagcccgtcaggtcgcccagcaggggcgaacacagcgggtccgtggggtcctgcgtatagcacctggcgtagaattgcagcagctcctccgtcagggacggatcgttgtcccggttgaattcgtaggacttcccggaaccggtcaggtccacccagggcgagatggcgatgagcccgcagggcagctcccggcccagctgcttcagcttcagacacagagcgcagatcagcccgccgccggcgctctcgccgcacagcaaaatctgctgcggcgcgtagccctttttcagcaaatagtcgtaggcagtcagtgcatcctccaacgcggcgggataggggttctccggcgccaggcggtacgccccgcagaacacgcgcacaccgcactcgctggccagcgtagccgcaaagcccttggcatagtccagactaccacaggtatagccgccgccgtggagatacagcaccacgccgctgcggcgctcgtccttaggcatgacccacgcgcccttgaactgctcgaagtcgtggtcgcggaagatcacctcccgcttgtgcagggcgctcatcagctcgcccagcttatcctgtcccttgcgggtagtctccagtgagcaacccgccacaaagggcttaaaaaaattcaattgtgaacgcaccagctttgccgataattccattgtggtcgttcctttcctcgttgctgatagatgattataccatattgtgcaagtcttgtaaaccaagccaaaccggacgaacgagccgcttttgtaccgcgtctcaaacacgagtcttttctttacagccacagattatatcctattccgttgttgatatgcacggacggaacggaatacacctttggcttttcgtgctacaagaagattccttccgatttcaacagcactcctcattcgattcgtatccgtgtctataccggctataattggcggccttgggatgcgactcctgaaatcgcagagctggaagcggatggtacgctgtgtttttcactgcgtgattctaacagagagcggaaaaccagccgggtaattctcatttcgatcggcgctgtatttaccggcatctttgcgcttagcgcatacgacattttcctgtcaccggctgtgcagaggaaacgtcaagcgaaggaacgagcgaaacggaaagcacaaaaacgagatagaagcaatcgtgagtcaactccccaaagttatagacaaccccgcctgcttcggctcagcaaaaaaggcggctgacgccgccttttttgtgttttacagatccagcttcagatcgccgtccttgatccacccccacttccgtagggggatggcgatgagccacgtcagcacggcgggcagcacaaaggagatcagcaccaggcccagccagtccatgccggtgacggcggcctttgcgccgctggccacatcgttgacccagccggtgtagacgccgatctgccccaccaggccgcaggtacccatgccggaggacaccggcgcgccattcatctccaagcggaacaggcaggtggcgacagggccggtgatggcggcagccagcgtaggcggtatccatatccggggattgcggacgatattgcccatctgcagcatactggtgcccaggccctgggcggccaggccaccccagcggttttcacggaagctcataacggcgaagcccaccatctgggcgcagcagcccgccacggcagcgccgccggccaggcctgtcagccccagagccgcacagatggcggcggaggagatgggcagcgtcagcgccacgccgatgaccacggagacgatgatgcccatgaagaagggctgcagctccgttgcccacatgatggcctgtcccacggcggaggccgccgtgcccaccggcgcggcgatcagcgcggcgaagcccacgcccaccagcacggtgacgatgggcgtcaccagaatgtcgatcttcgtctccttgctgacggccttgcccagctccgcggcaacaatggccacgaacagcaccgccagagggccgcccgcgtcgcccatgtagttggtggcaaaacccacggggatcagtgagaacagcaccagcggcggcgcgttcagcgcccgggcgatggccacggccataccggggcctaccataaccgagcacagcccgccaatggtgtagtgcaccgcgccgtcacccttgccgatggtgacgatgacggcgttcaggaacccgatgtggaactgctgcccgatggtgttaaggatggtacccaccagcaacgtgcagaacagtccctgggccatggcccccatggcgtcgataaaatagcgcttggcggagaaaacgatgtcctttcgtttcagaaaggcgcggagcttttccatagcggtatacctcgcttgtcgattttctccattataggcatacttgaccgcccttgtcaaccgccgctgttcttttctgcctgccgccgcagccaccagaacaccgccgcaccgtccgcagcctccccccgccgcagcgcaaatgcctggcgctccgggtgccactgtacccccagcaccggcaggcggctgtgacatatcccttcgatcacgccatccgccgcccactgccgcacacccagcccccgccccaggcggcagatggcctggtggtggttgctgttgacccggggcgcagtacccaccagctccgccagttcacccaccgcccgtgtgtcatgcagaatatcgcccaccttgacctggtgtcccggcacacgtgcatacagtgtcccgccgaaaaacacgttcagcgcctgcattccccggcagatacccaaaatcggcttctccgctgccgcataggctctgatcgtccggatctcatcctccggcaggcgatccgcgatatccccaccgccgggaagcagcagcgcagcgcacgggccggccgcctcgcgccctaccaccggcgtcaggtccactgctcgcagcgcttccatgtagtttacataatttaggccatcatcccagatcagcacccgcttctccatagccgtcccccctctcccatcagtacatgcgccgccgcgtcaaaatataccccgcagaaaaagaagttgcaccccagcggaaagtatggtatgatacaccccgtgacaagcagcggtatcgaagtggtcataacgggactgactcgaaatcatgtgattagtccccaaaagtgaatatttatacacggaagcgtatcgaagtggttgtaacgagctgcactcgaaatttcggcagaagctgggaatttcgtccccctgattctccttgatattcctcaacacagaaaatctcaaaatcgaatattttttgccgtctctcctgttttctctccaacgaatttttgagcaaatttctggaaagaaaaccggacgaaaatagacacggagagttgtccgagtggtcgaaggtgcagcactcgaaatgctgtagaccgaaaggtctctagggttcgaatccctaactctccgccacaaaaagcctgtaatcacgccgattacaggcttttttatttttgcccaaaggataagcctgcacgatcttcggttttcaggggagaaaatcagaagttctccccggcaccgatcgacccccagcggctgctgaagtcgccgccctccggcagggaaagccctgtctccatcgcctgtgccgaggtgatcttggatttgtaatccaagtgggcgtagatattcgccgtggtggtaaagtcgctatgtcccagccactcctgaatgtgcttgagggggacgccattggccagcagcaaactggcgcagctatggcgaagatcatgaaagcgaatgtgccgcagaccgttctgctccagcagcttgctgaaattggcggtaacgcttctggggttgaagatattgcccatggcatccacaaaaacatagccgtcatactttttgctgtagcaatttccgcatacgcgcctattctccttttgctgctccctcagcgccagcagcttttcccggatgttgctgaccagcggcagggagcgcaggcttgatttcgtcttggcgcggtcggcgcagacgatttcacatttgccgtctatctttgcgttggttacaatgtgcttaatggtgatggtgtcccgctcaaagtcgatggcgtcccatttcagccccagcgcctcgctgcggcgcaggccgtaaaaggcggtcatctgaatcagcagggagtacggatgatccttggacgcttccagcagcctctccagctcctcctgccggtaatagtccgcaatataccgctgcttcttggggcgctccaccttgtcggcggggttgaagggaatcaggtccattttgacggcgtatttcagtgccttgtggatattggcgtgatagtggatcaccgtaccgggcgacacgcttttcagctcatgcagataaaagctctgaatgtgcttggcttgaattccgtccagcgtcagtccggtgtttcggaaatacggtgcgatcttcctctttaccatttgcgtgtaagaggaaaaggtggtcttttccaccgagctgcggataatctccagccacagctccatgtagtcggcaaacagcatattagaggagatgtcctcgttctccttgctcacaaccggcgggacaaagctctggcgggtgtccagcagcagcttctcggcgcggcgcttgtttccctttgcggaaagtcctgtgggaatccacggctgcctgcgcttgccgttggcatccgtgtaattcagcaccatgtagtaattgtcgttttttatttgcaggtgtcccgctatcattcatccatacctccttttgctgacagcgtatgaacgggcaccctttcggaccgtaaccattatacggcctactcagatgcccgtccaatgtgtcgtttcagttcaaatccgtgtcacgctgccggctggggattgcccgccgagagagcgtagcggatcacgttgattttcggaatgcggtaggcgtttccgattttcatgccggggatatacccgtcgccaatcagctcgtaggccagatggcggctgattttcagcatggactggacctgggcaacgttcacaatgtcggggtaatccgtgaacatcacctcatacatggtctgcagctcagtcttcgtcaccgaaaccacctcctccgtcgtcgcgcataaagctgttgagccttctttcgaccatgtgaagcacataatggacctcgctttggctcagattaaaggacaatacatgtccttcttcgtcagtgagattgatggtcattcgttcgttgctgacatcaatatcagcgtagtatttctttaggaatctgtcgaagaggatatccaccatttcacagccgtctttggaaaacacgtcaatcatatcatccagatagtccattcttccttcgtccaaatcgaattcaatgatttcttttatgatttctttcattgtaaaatctcctttcagcgggcgtcgcggtctcggtgctgacgctccaaatgtttgttgtaaaagtccatagccttgacaagcgtctcggtcatctgtttcatagaggtgtccggacggaagaaactgcggagcttgtccaccggcaccttgacatattccacctgattgcccttgacttcggacatgagctgcatcactgcactatcagtaaacctctgctcctcgctcatgcgtcgcaaccgctgagcctgagacagcgacggcgtcacctcgtcgcagtccataatggagaagagcgtttcctgctcggacggctgcagatacgacagctccaccgccggagtcagggcaatccttccgtcatccaccatctggaggatttcggggatcaggttggtaaggcggatatagcgtttgacttgagaggcactgtctccctttgcaatttcttcgactgtcaacttcggaccaagttggtccgaagttcgcccttggtggcgcagcgcctccattttcatcttgtacgcaaaggccttttccgacggcagaatgtgctcccgctgtaggttgctgtccaccatggtaatgacggcctcctcgtcggtcagcttgcggataatcaccggcatggtgtccatccccagcgctttgcaggccgccagacgccggtggccggaaatcagctcgtatccgccgcccttcttgggccgcgccatggcgggagacaacacgccggcgtcggcaatgcttttcatcagctccgccatctccgcgtcgtttttcaccttgaaggggtggttcttgaagggcgtcagctccgaaagcggtagttcctccaccttcggcttgcgggtgtccgcccgctcctgctcggtcatgaacagctcatcatagcctctcaggcccaaatcaatggtttggtttttcaatttcatcatctctctttctactgtaatcagcgttcataatggttttcctctctcgccggagcgttccgctgccgcagagcacttttctcccgctccgtgagataggggtcgttctccagccgcgcctcaaattcgctttccagaagctcccggagcttcggatggtcctcaatgatgtcgcaggctgttttctttttccttcgcagatcggccaacaccgcggtgcaggcggcgcaggattttttcagttcgaccctctccgcaggatcggcgcagcctcgctgcttattgcggattttgctgcgtgcagcggatattgcatccatctccctgtccattcgtgcaagaaacttctgcacatcctccggcgtgtccaaatgctcccgacacaccagtgttatctcggcggtgaagcgatccagcctgcggcaagcctcccggcactccgctgacaagggctgccgatactccttttcgtacagcggcgcaacgcccagcacgattgccacacagcggaagaagctcaaatacccggtgacgcggggcaaatgcagatagaaatcccgctgccggtaatattcttccgttggcggatttttcctggcatattcccgtgtgtagggcctcatgaattcaaaatagcgccgggtcacacggatgtcccgctggttctccagcagcctgtcctgcagcgccttcttgtcatattcggctcccagccggaaggtacgcatacactttttggcgcttagagagcggatggttgcgtacctgcggtagggatcgcacacgaacacatagcccttcttccgcagcacggcgctcagctccgtccagctgcttgacatcgtcagcgcctcgtccagcgcccgccgcatgaggttgtagcgggtaggctcgccgttcttttcggcaaagtagaccgaccgcgccgttttatgccgttggggatttttcaccaccgacaggccatgctccttgcagatacggtcggacatatcccgcagcttgtagtagacctcgtattttgcctccagctttttgcccgtccacatattcaccggattcacaacaaagtggttgtgataagtgccggtgttgaagtgggtggcaacaagcacctgccggtcgttcccccaaagccgccgcgccgtctccacgccgatgcgatggcattcctccgccgtgacctcaccggtcttaaaggactggtaggcgtggtaggccacattgccgccggctttgccgaagcgcctctgcacggcagccatctcccttgcggcggactccgccctgcagtcaattccggtgacggcgtattgctgctccccctcatccagggttttttctttgtcggcagcatacagcagcacctgctccaggtcgcttagcttggtcttgctggggttggtgcagtagtccaccacacggctgacgctgtcatggatcgcccagatcttcgtcactgccatcggcatcctccttcccgtgataggcgcgcagaagcaggctctcgatctcggtcagtgtctcgtcaaagtccctcatggcaagctcgtagcggacggtatcgtggagcgtcgtcagcttctgatacgccagcatcagctcccggcgcggagcttccctcaccgctgcgccggttcccaaggttcggaggtattccgacatattcatgccgcatttctttgcctttctgcgaatggtattcttttcggttttatagactcgcacattgatttcctctgttcgattccgcatagatatcacatcctttcagcggggttacaggggcgcgcccctttcgtatcggcagatacgggggaattgggtaccgcatagctacacaaatcccatgctcgttatccttacggataaaaaagcggtgtatagccccgcaccccttaaagcggcaattcctcatcgccctccgcctcctcccatgacgcagatgacgcttgtgacgatgcttggggaagcctggcgatgtcgtcattctgtttccgcagtgacgcaagtctctcgctcccggaggaaccgtcatgaccgtcagcaccgtcatgcagctccaaaagcaccagccgggcagccgccgttttacggtattcgtatgtgattcccaagggcagcagcacatcgctgtaatgacgggtcagatgcttactggcgaggttgggcttcagctccgtattacctacggcggcaagcagctgggacaccgtgccccgaaaccgcccgtgcgccaagagaaaatccgccacctgaaaaacaaagtccgggatgcgttcctttcgcaaatccttggcgctgagcgcctcggtaatctcccatcggacgccccgcatctgcattttcagcttcttctcctccacatcccggcccgtaatgcagagggtggcgcaatcgccgaagcggtcatccttgcggagaatcatccccgtatccgccacgcccaaaatgcctgtggagccggtcatatcattgaaaatattgctgctgtcccgctcctttcgggtgtgatggacaacgaagatgcaaatgccgtggtcatcggcaagctttttcaggccggacagatccttgtagtcctgggcgtaggcattgacctttgcggaagcattgtcccgcaccatttggagggtatcgaggaatatcaggcccgtggagggaaattcccgcagagcctcctcgatctgcccctccagctccgcacccaactgcccgcaggaaaagccgaagcggagattctccggtggagaatccgtcagctcctgcatacgctgctgaacgcgccattcccggtcctccaaggccagatataccacatcggtttttctggtgggcagcccccacaccgcctcgccgcggctgatttgcaggcacagccacagcaccatccagctcttgccgatcttggagtcacccgctaaaatggcgagcccgtcggagagaacaccgtcgatgagcattttggggtgggcaagaggcttgtaatacagggtatcggcatcgatcagctgtagcttgttcatgtgtttcaccttctttctttcgctggtaattgtgttttttggtttggcgccgtacttccgatatcgtttttatatacctgccccgggggctccgcggcgttgctatgctcgctctttcgaggtcgccgcacagtcatatctgtctcggtaacggctattccgttgtcaaggtccacgggggaagcttagaagctcctctcactttccctttgccgaatttttttcagattttcccgctgcttttcaaaattttttcttttgagctggtaaattataaaaagccgagcttgtgcagagctttttcaaagttcccctcacttggtaggcagcgagaaggccaaaaaattaacccccttgaaaaattcttttgttttggctccaaattggagccattttcctatgcaggactgctcgtggctccgaaatggagccatttttcgtctatggcatcaaaattgatgccatgtccattccggatttcatcggtgtggctgcaaaattgatgccataaaaataagcgcctgcctcttttcagaagcagacgctcatttctcgtattcagtttttaccgtagcagccggatcagcagctcattgatatcctcggggggcttgccgcttgctaccagcttgttccgaaaggacaacagggccgttgtcagcagccgtcgctcgccggcgcaaagtgctaacacccgatttcttctatgcttgaacatcaccacacctcagcaataaaccagctcagaaaggataatctcttccgctcggctgcggatgctgttcatccgtcccacccattccatttgattctcagccttcagccgctcagtgacaccctcggcttccttcatctgcgcgaccagccgaccaaacatctcttgggctgtgtcaccgatttccttgagatgctcgtccagcttgccggtcagcagcatccccgtgtagatgccgtctctgtactcgcgcagataccgcctgcgcttttctgcgaatctgttgtacatactcttcctccttcacgcccgccgtatgggttttatcatcatccacataatagcgcaacccgaaggaaaagcccaatgtgtgaaaaacagatttgcagatttgaccattttacaattctgtttgcaagccaaattcgctccattcactccgagcgggtgaatggagcgaattttcagcgaatatttcccccatctgataaggccttgtgataaaaaagcaagaagttcattcttgaaagcatgggattatcctctgctttcctcgtaaatccgcaataatccttgataaatccgccttgttgtgatatacttaaattgtatagttatagctatcggaaactgcctgaaagtgaggacattttaatggaaccgaccatcgaacgctggtactcaatgaaagagatttgcgaatacctcggcgtcagccgtgatacggtactcgcctggatagagaaaagaaatatgcccgctgcgaaaataggccgcctttggaaattcaaggtcagcgaagtagacgcctggatgaagtccggcgtggcggcggataagtaattattttggaggtgcactatggcataggaagggcatcgaccaaagctattattacgaggggtgcacgaccttcaaggcggaagatttgagcaaggaatgaggtgcagatatgccggatcagaattggcaatttgaactggaagaatatatcaagcagggtgaacccgaccgagctgaaaaaagcgaggcgtggcagaccgccatcggcttgcaggcggtggacgggctgaacacctctgcctatctgctggatacggccaaggatcacatcgagggtaaaatcaccatcgatgaagcccagcagcgcattcatagctattatgagcagcgcaccacccgcaccgaaatagagaacgaaaccaaagaagcggacattgtttccgccagaatcgcaaaactgttgggggaaaaagccttccaattctcccccgctgagtggctctccatccatcgtaggctgtttgagggcgtgttcagtcacgccggacagattcggcagtacaacatcaccaagaaagagtgggtgctgaacggcgataccgtgacctatgcggattggaacagtatcaaggatacgctggattacgattttgccaccgaaaaacagttctcttatgagggcttgtccgtagatgcggcggtgaagcatctggcgaaattcgcctccgacatttggcagatccatcccttcggcgagggaaatactcgtgccaccgccgtctttatgatcaaatatatgaaaactttcggctttcgtgtaaacaacgacgcctttgaaaagaattcgtggtacttccgcaacgccttggtccgagcgaactacacaaatctgcaaaagggtgttcactccaccacaaagttcttggagatgttcttcggcaatctccttttgggcacggattacgagctgaagaaccgctatatgcacattgattatgtggaggaaagcaattcccaaagtgccaaacagcaaattccaaagtgccaatttggcactttggactgcactttagaagaattggctgtgttggatttaataaaggaaaatccaaccatcaagcagcaggagcttgcagacatcaccgacaaatcaatcagaagtgtaaagcgaattatgaagtcgctgcaagataaaaactatatccgccgagaaaacggcaagagatacggaaaatgggaagtggtggtttgatatgagccatcgcttgcggcggctcgatattctatctacgccttgcggctgaagaaatggtagcactcacagagaaattcgcaacaatatcctgatttgcgcgcaacaaattatagtggcggtgaggaatgctcctcgccgccacttactatgcacggaagcttagccaagcgtattttaccttgtttcaatagcagctatattcaggtcaacaatctctttaagcactaagtatgcatttttgaaaatgacttgccattcttcatccaatggatcaatgatttcgtggaatagtgcattacgaagacgatatacaaagtcgaggaaccaaaggacgctgttttgcctacgagattcatgcagtttgcgaaaccactccttttccgatgcagataaatcgcgctgaggcgtcaaattcacatcgaaatggtattgaaaatagtttaacgggcgttgttgaatcagctcatatgtgtttcgcgaacgtcccatttcatcaggagttttaaatgtttcgtctttggcgttgagatcaaaaatctgccatataagagagataattcgcttctcaaggttccctattttaaccagaaggcgtttcccataggcgttgttttcataatgcagtttaaacgcttccacaatactatgcgttagcgcgacatttatttcgcgtaataaccatgaaagatagtcctgctcactctcagtcggattctctttgacatgttctgttgacgattcaagaatccctgagatattgcactgaaattgaacatttccattatactcctcatagtatttaccgaagaaccgcgcaaatcccgatataacaaattgccacttagtgccgcgatttcggcttatttttaggccgatgataaggcaatcgcttttatccggcggaatgtctttgaaagtatattcaaagtcctcgtttacatgataaaagtcccaaaggtagtattcaggatattgctccattatgactttacgaccttcgcggtagacttgttccatagacgccattatctgatcatcaacgataagtttcttgctcccgcttgttctgtagtaatctttatatgcattcagatacttgccgtcacctcttctgtttgttgcctctggaaacatagttctaagagtagaaatataggcaaaccatgtcttaataaacagtgatacaaaatcagcttcggttactgctttccagtttttgtatatcttctcctgaggcatatttacacctccaccggaattttgtctttcagccatgccaatgccacatcttcgccttgctcaatagccatttcgacagcctgctttgcatattcaagcagttgtttggattgcttacgaagggcaaaggattcctgaactttggctgcgatttcttcttgaatgtcatcatcaatcatcggtaacggcatggaaagaagttcatctttgctaattgcagtaagaattgtccctgaacaacgttgcttcataagagcctgtatcggctcagatttgaaaaggacaagcaaagtttcagagttaatacaatcagaatcgagcacataaaacccggttgaacacagtacaccatcatattcgtcggtaattagggcacagctttgtaatgagccttcaacagaaggcactatcacctgtcctgattttacaattcggcgtgctctcgtgggtagagcactgccgtattgaatatcaacatcagaaatatcacctgattgccccacatctgcaagttctatgtattgatatgtttgttttgcatctgggttatagtttttatcatgcagattgcacaacgatagtaccgtctctcttgtattgagcttctttacaattgcctcatatttcggctgatagtattctgcatcaagacggccaaaagtcttaaagcttgccgacaacagttttattgcattagaatcatccttcagtttgaaataatccatgtccatttttcgtgcaaagaaagcctctgcttcatcatacttttttgaagcatccttgcgtaactgatgagctttttcataacatcttctggcgttttcttgaaactctctttttaacaacggtatttcaatagcttttacttcttcgggattaacatttgtttggttaatcgattgcctcgctctcctcctgatttcttgaatgccatattgtgtattcagaaacgccgctaaatactcggaataaatgtggatattatcaggaataagtcgcacaagataagaggcaaatgtctggggtatgccacagctgtaataaacacctgttcttccaaccttctcgaaggaattagttctgttaaataaaacatcacggtcatttagtttaacagcatagaattcctcgtttgataattcaacgaatttttctgtagttaagtcgcaaagagaatggtggatttcgttcatcctgaaaatcggatatccatagccttcggtattcatatcctttgaaacaccatactgcgaagaaatcaagtatttaccgataggacaatattcaagattaccattatgctttatttttgcggtgaagaattgactatcaatacgacagtctttgttctcttttgcgaagctgtacaatacttcgctgcattccagcccatccatcaaagccttatatttggcttcattgaaaggttcaacggatgggcttaccgaaaaaaacttaaaccttccttttttgcaaattctgcaaaggcttctgctatgcccggctcaagcaaagcctctgtcccgtcccgcttcatgtaagaaagctggaacaggtcgtgatcgacaatcaggtgattgtgtttatccaacgcgggcagtcctgtttcaggatcaaacagataaatcttatcaccggagttatccttgctgggcttttgcatcgtcgcaaagaagatcgggtagtcttccttctttggacataattcatcgtcccacttctgcacaaacagaactgaggtttttgttccggtatgcggtttgaaaacatttccgtgtaaaccgacaacggcgagaatgcggcagcgttctgcgatatattcacggattgacttatcactgctgttgttaaagcgcccttgcggaagaacgatagccatacgtccgccgggcttcagaaagttcaagttgcgctcgataaagagaatgtctctgccaaccttattctgccattttccgttagattttttaccaagctcgtaacgggaaataatcgtattctctttaatatctccggcaaatggaggatttgccatgaccagatcaaactggaactggctataatcgctgctgcctttgggttgcaacttctttaattttttgaaaccttcattataggtatcattccaatcttcctgtttgattatctcgttccagcgggcatagtccaatgtattcaggtgcagcacattggtctgaccgtcaccagcgatcagattaagggtgcgggcaacccgaactgttttttcatcgaagtcaatagcaaatacattatcgcgcacaaaatttgtttcttccggtatgcgctgagcagccgtaaatccttcgtcttccggaagccctttttcgcggcgaatatctttccatactttgaaaatactatgcacggtaaatcctgagctgccgcaggcggtgtcgattattttgtcattgacggtgggattcatcatctttacacacatatcaataacatagcgcggtgtaaagtattgccccttttctcccttttgcgccttgctcatcaggtattcaaaggcatcgtctacaacatccagattgttgttgaacagtttaatatcctggagcgtagcaacgcagacggcaaggtgagaaggcgagagcagaattttgctttcgtctgtaaaaataccctcccattttttcttggcgtcatcaaataacccctggattttctctttcagctcaaagtctgtttcaccggcattgcggaactttaagtatgcgccggcatctcgctcacaaacaagctcatcatacagcttggcaaaaatcaacttaaaaatctcttcaaaagaatccacccctgcactggcaagcacttcatcttccatttcctgaataagagagcgaagagaacgcttttgctggctgattctatcaatctttttcagatcttcataagtaaacttctcgttgataatatcagcgagcttttcggaaacttttgggatatttgtaatcggctcaaaatagttagggtctttcctgttgtagtaagaaatctgctcgccattcgtccacacaccgataggtgcgccagtggcgttgcagtaagacttcagttgttccttgccatctgtcagtttgggctttttgagctcaacaatgatgtagggaaccatcagacgatccttatccataatggcaatatcagcgcgcttaacttcgcgaccaaaatgaatcgggaattcaacttcaatacggcttgtaggataaccgtactcgtggataagcttgtagaggtagagttgacgcactgcttcttcaggtttaagcgcgatttctttatcacgtttcagacatttaataaagagagattccttgcctctgatagttttgacaacgatagcatcttcaacatatttgcgtgcttcctcagaaaagagtgaaacatcataatttgtattttttaacacttcattcaaagtcattttattttcctcccgaaattgttgctaacatttctgcccagcatttgtcgtttatgttgttttccaatccaaaattgatgagatcaattaactttctatgcttcatcaaataatccatttgctcaatcggcaagcgtcctcgatctgcggaagctttttctttgaaaaggtttgcttcgtcattggaaagcccaagtcttcttatgagagcttctatatccgaggggttgggaggagcgttgttctttcctttttcgatgttactgatatattgtcctgacttattgattgcagaggccaactcatcttgtgttagctgagcgttttttcgcttttctttcaaaaacaagccaaaatcagaaggttcaatcaaggtcactcctcctttataaataaataaatttgtttatttattatagcgcaacaagatagcattgtcaatccccaggcttataggcatcgccgttgggttgttcccaaagaggattgtgacacacgagtaaaatccttatggcccggttttataacatcattctggttttacattgacatagttccgataatgcaatgacattattccgtggatttttgatattgttccgaggattgttctttttcacccgtcaaaggtgcgtgatgctctcgcccgggctcacgaatcaatcaacaaactggcgcttgtaccggaaagtttctgaatccttgctctgttcttatttgggccataaagtcgtgcatgctggagctttaatagctgaaaacagcgggagaaatcgcagaaatctgcgttttctcccgccatatcattcagttgatttgcaaaataatttttggcagtccctatccatacctccacagtataccggctcaaaaaggattccttccctgtaaggctattccgagatcagcgtttttcgccctcttttgccgccttctcaatgctgcgaatggtctgcaaatattcctcctccacgggagaaagattctgcgcctgatatttcttgtattccgcctttgccttctccatcgcctgcgtgtggctgacggttcccccgtcggtgagcagggcctctccagtggaggcaaggatgcggtccaggttctctacataatcgctcatgtacatgggccggcggcgcatcgcctgaatctccgcaaagtcaaagtatccggaaacgagattgttcagtatcttcagttcgtccgcggagagatagttctttgcgacggcaatatccttcgccgtgggaaaatccccggaaaatgcggtaagccccataaatggcttttcggcatcggctcgctcaaaaatcacctctgcggcggtatggccatgggcggcatagtgcagcttgttctgcaccattttgaaaaaagccaccgactcggcgcttttggggtcatagtccacgctagtagcgtagaggtcgaggacctgacggtacatcaccttttcggaggaacggatgtcccggatgcggtcaagaagctccttccaatagctgccgccgccgagattcttcaggcgctcatcgtccatggcgaagcccttgaccatatactccttcaagcgctcggtagcccagcggcggaactgcgttgcaatggaggacttgatgcgatagcccagggagatgatcatgtcgaggttatagtgatttacggcataggttttcccgtctgcggcagttgttcggattttccgaacaacttcgctttgctctaactcgccttcctcaaaaatgttttttatatgctcactgacattggccttactgctctgatacagctcacaaagctgcgcctgtgtcagccagacagtttcatcctgaaaccggacatcaatttttgtctcgccgctttcagactggtaaatgatgatatcgcccttgttttcatcgttgaggaaattactgctcatttttgttccctcccggcttttcggtggcttcagcaaatgctcggcttattgctattatagtatcacaaaatcggcgttttttcaacagacgccaagggaatgatgccgctgtgcctctttttgagagaataagggaaaatgtccgcatcaatttctccatttctgtgcctcccaaagcatatcgatatgccggcgagatttgcggttggtgttgttgtaatcgtccgagcagagccagtcgatgagatagcatttggggatcatgtacttctgcagcagcgtcagcgccttcagcttccccacgcgaatccattggcagacggtgcggcggttatatcctgtgaaatccacggcggcggccacatccatcacatccggcagcgcggccagcttgctctcatagtagcgccgaagcttcttctcgtctttggcgcacggcggatggatgcggattttatagggccgaaccatttcgcttccgtatttgtaccagttcttcggcgctatgtacttttccgggttgacctcacggtcgttcataaaagcgatcacatcgctctttttaatggcgtagcagcgggttttcttgccggtgcaggtgtgcggaatcaggttgaattggagaagatagagcgccgtctgcttgctgatgtggcaggcgatctgcatctgctccttgttcataatctccgggtattttttgaattccttggcgtcgtatttcataacgaagactcctttctgtgtttcggtccgaaagggtgcttcgtataatctgttttgagccggtttttcttgcatttaatccggggggctgtccgcaaagccataccggacaagggttttcttcttgcgtgttttcttgccagcacgcaaaaaaatcgatcgttttggggcatttctcatttcaatttgaactctggttttttctgatatggagctggtcaataccggtcggcgcgtccgaaacccgttgcagcacaagggttttcgccgtttccaaaactgccgccaccgaccacagcagacacgaaagtaccaagtgcgaacaagactcgaaatgcggtaggtcggctcaaaccgacgcgagagttcgaatctctccatctccgccaccgaaaaagcctgtaatcaagccgattacaggctctttcctttttccgaaacgggcaattccgtgctctttcactttttcggagagaaaatcatccgttctccccaacatcaatcgatccccaccggcttccgaagtcgccgccctccgatagagcaagccctgtctccatcgcctgcgccgaggtgatcttggacttgtaatccaggtgggcgtagatgttcgccgtggtggtaaagtcgctgtgtcccagccactcctgaatgtgcttgaggggaacgccgttggccagcagcaagctggcacagctgtgacgaaaatcgtgaaagcgcatccggcgcaggccgtggctctccaagaattttgggaatgccgaagtcaaataattggcccgcttccgctcgcccagctcgtccacaaacacaaagccgtcgtattcatagttgtagcagttgccgcagacctgcttgttcagctcctgcgccccagcaagtaattttgactgttcgggcaagggacctgaacagcgcaaaatccgcaagcgggtactcgcttgctgtgcttgctgactacttcgtacccccgtatttccccctctacccatactacaatccgagtggggtgttttggccagtttcggaggactttttcaaaaaatgtcgctcctatccgtaacttttcgctgctcacttcgccggacgccttgtgtttcttcggatattcgtatataatgtatcgtgttgagtattgtccatgcggaggtgcggtatgaacgggatcaagggctatatctccattcgggaggcttcctatcgctggggcgtgtcggagcggcgggtcaaccagtattgcgccgaggggcggatccctggcgcgtcccggttcgggcgttcatgggcgatcccggaaaacgcggaaaagccgtccgacccgcgctttcagggacagcaccgcgattccggcaggacaagcacctgacagacacctggctacattggaaacatccgcaaaagggaagtgaacgctatgacctgcgacgagagcttataccgccaatatctgagcggtgacgacgaagggctcaatgccctgatgaagaaatacggcgaccccctgaccttgtatatcgacggctatctgcacgacgttcacgaggctgaggagctgatgctggatgttttcgcctatctgttcacgaaaaagccccgcatccgggacggcggcttcaaggcgtatctctataaggcggcgcggcacatggcgctgcgccataagagcaagcggaagcccctgttcagcctcgatgcgctgaccggcgagccggacggacggctgctggcggaggaggtcatccggtcggaggagcgaaaccgcgtcttgcacttctgcatggatgaaatgaacccggactaccgggaggttttgtatctcacctattttgaaggcatgagctacgcacaggcggcggaggtcacgggaaaaacggtgaagcagatcaccaacatggtatatcgcggaaaagagagcctgcgaaggctgctggaacgggagggaatcacaaatgcggagtcatgaagagcgcgtcgcggagacgaagcggcgcatcgccaaaattgagcgggagaaacggctgcggcgcagtacgatcaccatggcttccgccgtggcggcgtgccttgcgctgcttgtaggcgcgtccctcgccatgcccgacattgccgcaagcatccagacaggcgactactccggctttgaaacggcggcaagcatctttcacggcggcgctgccttgggatacatcatcatcgggctgctggcgtttttgctcggcgtgtgcgtgaccgttctgtgcttccggctgcgtcagatgagccgtgaggacgatcagaacaaagaaagcgaggggattcatggagctgattgagaacctgctgcaactgctgttcacgttcgtgggcgcgctgctttcgggcatatcctaccggaaaagtcgcaggcaggcgtattttctgctgctgtgcttctacggctgctttgccctcggcgcgctctactggacgctgtatctgctgctgttcgataccacaccccgggtcttttatgtgtcggagttcggctgggtggccagcctcatcttcctgcgcattttgcaagcaacgctcgccactcaggacgagcgcagcttccgctgccgcagggcgtggctcgcgcctgcgttcggcgtgccgctgctggcgttctactgcaccttcggggacattctctccaacctgatctggtgcggcatgatgatatggctctccttctgcgccatccgggggctggtctacgccaacgggcagacggatacggcgcggaatatgcggtacttccacatcggcgtgctgtgctttgcgttctcggagtacctgctttggacggtgggctgcttctggccgaacacctctccggccagcccaaccttctggtgcgatatgctgctgacgcttgcgattctgtggctgctgcccgccacgagaaaggcggtggaagcatgacctatattgaaaatatcttcctctgcatggtatctccgctgctggtggccgccctgtgcatgggcaggcggcagctccgcttcttcctgttctgcatggccgggatgggagtgtgcctgctctcggcctatatcaacaccttcctcgcggcggtgtgtcaggcggacgcccttgccgccacggcggagatcgcaccggtggtggaggagatgatgaagctgctgccactggtgttctatctgctggtgtttgagccggagggggataaaatcaaggctgccgccatcacggttgccctgagcttcgccacctttgaaaacgtgtgctatctcattcagaacggcgcggaccgcttctcctttatcttcttccggggcttcggcacgggagccatgcacgtcctctgcggcctgatcgtgggcggcgggcttgcatacacatggcggcggacgtggctgaagatcgcgggcacctgcgggctgctgggcgcggccatcaccctccacgccacctacaatttgctcatcgcccacggcggcgcggcgcagtacatcgcctacgccctgccggtgctgctggtggcggcgggaagatggtccgttttccgcttatcgcagaggaaataaccgaacatttactccctgagagctgctttttggcggctctcaaatttttttgaaaaattttgcgttttgggtgagagttttttcgtttttttgtacctatataagtgaaagggtttttatcacagtttcagacaaaccggagaggaggttcgaacgaaatgtacgataccgcaagacgggtcgcactcgtcaagcagcgggtgcgggaaaacacccgccgaaggcagcggcgcgaggcaataagcctctccgcagcgtgtatgctgctgttcgcggtgctgacgcaggcggcgggcacggtcgccgggccggggcaaccggaagcatggggcgtgttcggcgcgatgctgctgcgggaggacgcgggcggctatgtgctggtagccgtcgtctcctttgccgcggcggtggcgatcaccgcgctgtgtttccggctcagaatcagagaaaaccggaaaaaaggcggggcggacaaaccgaaccgacacgaacaggaggagaaaagccaatgaagaaacgaatacttagcatcctgctgctgtgctgcatggtgctgacgctgctgccgacagcggcctttgctgcgggtgagctaccggatgtcaagctttccgtcccaacgacgtttgacaagaccgtggaccttacaggccagaacaaagaattgaaaatcacggacagcaaaacctatctgatcaagggctccgcagatccgaactggtattttcaataccggatcaaaatcgatggcaagggcaagaacattacgccgcacatctttctggacggcgtccgccttcaggcacccaaggacggccctgccatcgagctttacggcggcgcctccgcctgcctgtactttatcggcggggacagcgagctgatcggcgcggagaacttcgctgcgctgcagaaaaacaaaaccgatggctatctccgggttctggtgcagacggggacaaagctcacgtgtgaaggcggcaggtatggcgctggcatcggaggctcaaaggtcggaatcaagaacttctcgcagggacacggcatgaaccttcatttcggctctctggcgacgggtatctatggcggtgagattcttgcgaccagcggcgtatacggtgcgggtatcggcggcggtcagggcggcgtcggcgagcagatttatgtgtattccggcaagctgacggtgcggtccgtttcggaaggcgcagggatcggtggcggtcagggcggccccggacgctttatttatatcaagggcggcacggtgaatgccggcagcgagtcaggcggagcaggaataggcagcggcgatcaagacggacagaacaagtcggaagatgcgcatcatatcgagatttccggtggaacggtcgaagcttggagtaactatgccggcgcaggaatcggtggcggaagaggcggttcgggctatgacatttccatcactggcggcgtggtgagggcgcagggctacttgggcgcgggcatcggcggcggcatgaacggcaacagcgggaacattctgatcaaggacacaacgctgactgcgctggcctttccgctttatcaggactacggttatacagagctgtctgcatccgcggtcggaagaggctcgaaccgggcgtactacatggcagtgatgcaagatcaggaatttgcaatgattatagaagagaacatcaaaatcggagcctcggacgggaagtccgtgtggctgagcgcgacagggtggcagtggcgccacaaccaggaaccgtataagaagtactggggcaccacaacggagcttcttatccccaacgaaaatgggcgcgtggacctgcagcggttgagcctgccatatgcctacaattacggcagagtgatcagcaagctggagctgcgctgcgaggaaagcacatgcagccatgaactgggttggacggaccgggacggctgccacatctgggcctgtgtgaaatgcggcgcgcgagaccccgctgcggaaatgtccaaacaaaacgccaaacacattcccggcgactggagcaagcagaagcagctctgcactgtgtgcggctatgtgatgggaacggacacgaaggcgccggtgctggagggtttgaagaacggtgagagctacaccatcgaggatgtcatcgatggaaatcccggcgcgtacaccttcaccgtgagcgaccctgctgaatcgggagagacatcctccggcatcaagtcggtgaccatcaacggcgagccgcaagccggccccacctatcgtctccccgcgccggatggcggcaacaatgacgcgggaaatgaatataccgtggtcgcgactgacaacgcgggaaacgaaactactgcgacagtcagaacatacaggcggcaccacgtgaaggtcatcagccaagacggcaagaagacctacgccgatctgatgctcccgcacaatgaatatctggtgctccagatcaggctgccggcgggcgtgtcggcaacgctgaccgatcaggcagacgggacggaaatcccatatgacaaggaaaacggagagttccgggcaggtctgatcaccaaaagccggacgctcgtgctgaattattcgacggaatatccgagggtagagcttcgtttggggacggggcagtacttcacgggatataacgcggattcggacgaaccgtattatctcaaaggcgcgtccatggatgagaattcctatcagataggcatgtgggtcgacacggacgcgaagccaggctattacctcagctctccggagcgctacacgcaggaagagctggcagcgcttgacgggtccctctggaaggaatacaagatagcggaagccacgccgggatcgatcgtgctgccatttatcttaatcacaatagacgctgcggcgtatgaagaaaacggcggttggtatgtctacgccaaagccacgaacccgacgggaacgacctatgtctctacgccgaagatgatcattgacgtcgagaacccgaaagccattgatttttcgaccggcaaggaactggtaagcaacggaaaatactggggagacctgcggttcacggtagaggactcatcgcccgtcacggttcgtcactatacatccccgggtgggaccgctgaacttttgacgccggatgaaaagggcgtttatacgatctcggcagagtatgacggcagcacccaacacatgcttgtcatcgaagacgcctgcggaaatacgacctcctacaagtcgttcaaggtttgctggaactacctgatcaatgtgcgggagaaggaccattgggatgcgccgcctgcgcagccgattcgtatttccaagggacagaatctgcaagaggcgctctccaatatcaatatcggggtttttgcagctgacaccaacgattggatacctgtcgatgtttcgtggaagatcccggacgattatgatccgcagtcccgtcgggagcagacctttaccgtcctcggcacggtggttctggaaggcaccggagcacgctgcccatcaggactcgatgttgtcccgcgtccgggagaggagtggaagaagaacatctcggtgcaggtgaccgtggagggcgagccgcagtataaggtgacggtgcaggattgcaaaaacggcagagtcaaggtggtgaatgccgcgggaaccgccgaggacggcacgcctctgttctgcaaggacgagcttgtcatgctctccattgcacccgatgagggctatatgctaagcacgctgtccgtcaacggtatccccgccaccgttgcggctggggaggatacctataccttcgtccagccggagggagatgttaccatcaccgcagcgtttgaaaagcgcaacgagcataccgtcacttttgaggcaggcggcggctccgagcctgaggagctgccagatgaggtccccaccgcaatgcccgccaagaaggtattgcacggcagcgagtattctctgccggagtgcgagtttgttgcgcccgaaggaaagcagttcaaggcatgggagatcggcggcacggagtatccggtgaacgcccctgtgaccgtcaccgctgacatcacagtcaaggcgctgtgggaggatgcgcctcccgcccatgagcacagctacggtgactggagcaaggacggcacgagccactggcacgaatgcaccgatgatgactgcccgaagaagcccgagagcatcaaggacaaggctgcgcacgtctacaccgatgacgcggatacgacctgcaatgtttgcgactatgaccgctccgtcacgccgcctgcacccaccgagtttatcgtcacctttgacgcgggcgatggtacgtcctctgtcggcagcatgaccaccaccaatcagaagctaagttcgctgcccagtgcctcccggagcaagcacagcttcaacggctggtacaccgaaaagaacggcggtacgaaggttacgacggataccgtattccatgccaaaaccaccgtctacgcccactggacgtataccggcggcggctactactatccgcccgtcacctactacacgctgcgctttgaaacaggcggcggcagtgatatttccagtgtgcagggaacgtacaatgcctacattgacctgacccaatatgtccccacctggcgcggccacacctttaccggctggtacagcgaacgcagcctgaaaaacaaggtttccggtgtttatctggcgaaggatatgaccgtgtatgcaggctggcgcgtgaccacagtcccgcagaccggcgacagcagcgtgttaggcttgtgggggttctccctctgtacatctcttgccggattccttgcactgaccacatggcagatcaggcggcggcgtcaggaaaaatcactgcaaatcatcgaaaagtaaacaggctcacctttaggggcgcggggcaaatagccccgcgccccttttcgatttcattcgtcaggaaaggcggttgctcttttgaacaaccgcctttcgccatatctatccgatttgaacagaaaggaaatcagtctatggcaaaagagtacgggaggtgccgctaatgctgcggcaacgagccgcgccgggagcaacatagccggacgatacccggacaacataggatacctatgccctccggcaggcaccgacaatttccatgctgaaccgcaccgaagcgcccatgcaggcttttatgcctgtgtgggcgctttttgtcatccacggcacttcttcgccgtgggctgccgctccccgccgcccttcgttctggaaggaacatccacccgaacaggacgaaaggagcgcagcatgagccgcgaaaaaaatgtttttgagaagtttccgaaaaaatggccaaaagggccatttggaaaaccagtaaggggtgaaaggggaaaccacgacctgccttccggcgcgaagggaggtgagacattaccggcataagcagcacaccttcgatgcgttccgagcagtgagcctagaagcgtgttttacctgcaccggaaccgccgcatacaagtacattcagatttctacggtgctttcttccgtccaggccgatggcgacattttgcgtcagcagcttgttttccgtcttatccttgttggcatatttcttgttgaccgaaccagccgtgccccatttagctgatccgtgctcttctcgccgtctgtaattgtgctccgtggagagatagacgccgatggcgatcccgtacaccaaaagcaaagtgaggacagtttttacactgtcctcacaaagctgtatctggaatgggttttgcatcaccgatccgaactgctgaaccagtccgggcaatccatcctttaagcaaggagcaatcaacaggccgagccacacaaccggaattatgccgcaaagataaaggatcacattctgcttggagagcttatcttgcctcacggtcggctctccgtttctctttctttgttggggcatcaatgaccttcaggatcaaatcgttaatgtcttctgtgggcttttcgtcccggagaagatcgttccgaaaatccatcaggctgctgaccatcagacgctgctcaaaatcgtccagcgtgacgactttcttttcctcagccatattggggtacctccttatggagcttataaataatacaacaaaaactcttaaggacgatttgtccgttgaaatcaagcaaggcagcaaactgtccattgcggcggcttgcttctctatctatgcctttcaagaattgaaggcgcagctctctcaaattgatgagttgcgctttattttcacttcgcctatcgctgccatttatcgcggtaacataccatgaatcagccgctgcatcccaatcaactttttcatacagatagtaggcaccataagaactccgcaggattctgggaaaaagctcgatatccttcagcgcgtcttctgccgaaaaagtgcatggtttattctgctcatcgtttacaacctcaatcatctgtgcttcttcagcagtcaagaaggcggcatcttcctgaatcgtttcacgggaaaatgcgctgaagccactgctgcacacgacctctgcacggcgattttcgtttgcctgctgctgcaacgtcccgatagtcaaatcgattgtcggcaggcagttctgccgtggcccaatcctcctcactccaagcgatggcctcacctgaggaagtcccacagtcgcatagtaaaaacaacaaaagaacaggcaggcagcggctcacgccactgcctgcctgttcaaaaaaatcaattacttagcgcatctgtgagagagaagccgggggtgctgcttgttttttccccttttcccgttacagaatagcataattcacgatcaatccagcaaacacgatggacaccatgctcagcagcttgatgaggatgttgatggccggacccgcagtgtccttgaagggatcgcccacggtgtcgcccaccacgccggccttgtggcaatcactgcccttgccgccgaagttgcctgcctcgatgtacttcttggcgttatcccaggcaccgccggcattggccatgtagatagccatcaggaaaccagtaacggtggcaccggccagcagaccgaccacacccttgaaacccaggatcatacctaccacaatgggcgtcaccaccgcgataacggtgggcagcaccatctccttcaggctggccttggtgcacagatccacgcagcgcgcgtagtcgggatctgccttgccctccatcaggccagtgatctcgcggaactggcggcgtacctccagcaccacgctctgggccgcgcggcccacggagttcatggtaagcgctgcgaacacgaagggcaggcacgcgccgataaacaggcccaccagcaccacggggttcatcagggagaagtcctcaaaggtgacattcgcgcccacttccttgaccttttcgatataggaagccatcagtgccagagccgtcagcgcggcggagccgatggcaaagcccttgccggtagctgccgtggtgttgcccaaagagtccagcgcgtctgtgcgcttgcgaacctccggctccaagccagccatctcagcgataccgccggcattgtcggccacagggccgtaggcgtcagtggccagggtgatgcccagcgtggacagcatacccactgccgccaaagcaatgccgtacaggcccatacctgtgctggctgcgccgccggagaggaagaacgccaacaggatgcacaccgccacgatcacgatgggcaccgccgtggagagcatacccaggccaagaccgccgatgatgatggtagcggagccggtctggctcttgctgctcagctcctgggtcggcttgtaggtatcagaagtgtaatactccgtggccttgccgatcagcacgccggccaccagaccggagagaatggccacatacagtccccagtgctcgatgcccagcagggcccacaccagaaagaaggagataatagcaatcagaatagccgccaggttggtgccgcgggacagtgctttcagcaacgtgcgctggtcggcgttctcctcggtcttgacgaagaaagagccaatgatggagcagatgatgcccaccgccgccatgaccatgggaatagccatggccttgaaggcctgatcgctgaatgccgccacgcccaaggcggaggcagagacgatggagccaacatagctctcatacaggtccgcacccataccggccacgtcacccacgttgtcacctacgttatcggcgataacagcggggttgcggggatcgtcctcgggaatacctgcctcaaccttgcccaccaggtcggcgcccacatcggccgccttggtgaagatgccgccgcccacgcgggcaaacagcgccatggagctggcgcccatgccgaaggtcagcatggcactggtgatgtcagcggcctccagcttaaacacgaagcgcagaagcatgaaccacacgctgatatccagcaggccgaggccgaccacagtaaagcccataacggagccggcggagaaggccacgcggaggccgcggttcaggccgtcgcggcaggcgttggcggtgcggcagttggcctttgtggcgatacgcatacccacgaagccagacaggccggagaagaaaccgccggtcaggaacgcgaagggcacgaaccaagtcagcaactttaaggccgccataatgcacaaaaccacgatcatacaggcaaaaaacacacctacaacggtgtattgccgcttcaggtaggcgttggcgcccgcacggatagattgcgaaattttgctcataagcggggtgccttcgtcaaaactcagcacttttttgccggtggcgaaggcgaagataagtgcgatgacagaccccataaaggttgccaaaacaaggtatttttccatgtttttctctctttccgttccgaattgttgtgaaattcgaaatcttctttttgttcctgaaatattataaagaaaaacagctcgcacgtcaaattttcacactttttttgggtacgcctgaaaaagtgtccggttcttttcgttattttgcccgcaacttttttatgaaaaaacttcccattttgtggcatttacatccggtttttccccagccgtggaagatgtaccatacgtttagaatgtatttttcgccacgatatcccacggtatttcaggtacaaaaatttttttatgcaactttttcacttgtattggtaccatttccttaaaaaatatagcagaaatcctttttcgcactttttgctgcgtttttttgcttttccgaattcgcacgccgggggcgtttgctaaattgcacaacggcaatttgcaacattttccccgcaaatgtccacggcgggagaacgcgaaagctatgaagctttgcgttcaaactatatacatttactttccctttttgatacctcagcggtacatctgggtaaaaaagaaagccctttcgggcaatgtcattaagttaagcaaatccgcgcacacgaaaaaaagcccacctcgacttttcgaggtgggctttttttatgctttcgttatgtggattgcttgtgcttacttcgcgggcaggacaatgacctgtccctcgtaaatggtgttggcgttcacaagacggtcggcgttgcgctcgaagatggccttgtacttcatcaaactggaagttatctgtctttagatttagctttcaaaatggcatatgcaatcaaagcaccgataattataccgataaagttacaaatcaaatcatccacatcaaaacttctgccaaagaacagttgtgccatttcaaaacaaatcggaattacaatagcaagcaataccagctttcttctgttcctaatttctgtaacaagcggaagaaaaaagccaaacggaacaaacatcgcgatattgccaatcaacattgttttatcccaactccccagtgaaagttctccatttaggcattttataactgaaggaacaagatttactacaccgaattgaaatacttgtctcatttcattccaccatccaaaaaatatgccatcataaaaagataaccaaaagtttgcaggaaggacaacaaggcttacaagaccagtgagatagcaaatgaaaacagtttgcaaagcttccttcttccacttaatttgtattttctttttcttcagaattatggaacgaattgccaagaacaccaagcctacaatacaagcacttggtagagcttgcaaaaagtatcccaaaacacttccgctattcatttccattctaaaaaaattgtatatatctaaaaacatttcttcctctccaaattccgatttttctatttaaccctctgaaaactctgtattttcaaggcttttcgccagtgtaattctcaaaccttatgtattttcccttgtttttgcccttatgagcgaaaacaagggaaactttttgttattcgccgccgactaccttatccagcagccttgcggaagtacgcttcgcttcccttgtagcgtgagcgtagatattcattgtggtactgacatcagcgtgtccgagaagctcctgcacatcctttggggcagccccatttgagagcagattgcttgtgaatgtgtgacgaagctggtggaaatggaagtcctccaacccatcgacctttttccttgccgccctgcacataatccctaccgtactcggcgattcaaacgccccgtccggtctgaggcagacaaaggatatttccttgtatccctccgggacttcttccgttctcggcagactgtaaacctcgtaataagtacggtctttttctttgacctcactgtaatagttgaggctgtacaactctccgtatcggaagcggtttttatgctgttcggctttggctgttctaagaatttctgccagtgtgtcgcagaagtccacagtacggattttctttcgcttggtcgctccgatttccgtcttgtgccttgccccgttgtagcgcatactgcggcgtactgtaaggtactgaccttcaaggttaatatcctgccaggtcaagccgcaaacctcgccgattcgaagccccgtgtagtaggcaatctgaatgggcagcaacgccggattgtctttctttttcagaaagtcctccagcttcagatactgctcatggctgattgtgggggcggaagtcacattcccgtcctcgtctgagaacagttcgtattcttcctttttgcccctccacactacatactgcatcgggttaaaggaaatcagccttttcgggaacaccgcaaaacggaacgccccttgcaggactgccgagaacaatcgcagataccccttgctgagagcctttgcctgtgtgccatcgggatttgtgccaccgaaactgaggaagtcgatatatgcctgtaaatggtcagcagttacagttttcagcttgcgttccccaatcgggtactgcttgatacggtttaccgtaccctgatatgccattactgtaccattgctcagattgccgggcttcagttcttcttccacccattgatccagcaacgttcccaccgtaacattttcggacttggctacgaatttcttttcctcgtagtcttccattgcctttcgcataagggcttctgtttcagccttgctttcagtgccgggaaactccttctgcacacggtttccgctttcatcttcgatatagaagcggtagtaccactttttgcctttctttcttacagaaccttttgccatagataaaatctctcctttctatccgtggcaatcggaactgtgacatatggtgtgcgtaaagtaaatagtgtcacttctgccgattggtttcaatcggcttttttaattgtcaaggtgccacggaattgttcttttcggatagccttttttcagcttccgtcactatctcgaagagatcgcccatctttacagcggtacgaccttcatcgtagatatgtaaaatcccgtcaagaaatcgtttcatatcttcgataggtaattccatttcgttgcgatagaccttttcggtaatcgctcccgactcgatagcgtatcgcataagcgattgcttcaagccttcatcgtttgccacacggtcaacctctgtcatagcatcggaaaagtagtggcaaagcacagagtacaaatcaattatcttcccgagaaatgtagtgagcatctgttggtgcggctcaccctttacggtagaggacaccgtatcaagatatttcttgatgtgctgctcaatgtccttttggcagagtgtatagctgtcatattccttatcatcagaaagacctgtcagccattcgggagtggtaagaagtgcttcggcaagaccgttgataatcattgttcgcttcggatcaacgccgtcagcttcatacctttgaatggtagacttgttcacgccgatacgcttgccaagttccggcatagaaagtttgagttctattctacgctctttaatgcgttccccgacttgttttggggtaaacattgtttcttcttccaaggtattcacctcctgtttgagtacagtatagcacaaacaagctcaatttgcaacccctatttccgaaaaatattaaaaataatccttaaaaggttgcaaaacaggttgacaagtgatggcaaaataagtataatgataataccaaagttgcattttgagtatttaagaaaggagaacagcactatgaacgcaatcaaaatgggaatgacaatcgaagaagcggcagaaaccagcggcatcggcagaaacacaatgcgaaagttggtggactggggcaagctgcctgttctgaaggtcggacgtaaaaccattatccgcagggataccttagagcgttttatgaccgtcaatcagggcagaaacctactgtgtcaggatgatgtccgtaaggtagagtaaaccgttctcaaagccctcggcgtttgagagcgaaatacacccctcgcacaaatctacgatttgttcaagtgatatttcgcccttgcagggagcctgtatcacagcttgtcggcatataccgccgctatgatacagagaaaattgctgccgcaattttcattggctgtctcgtcagcacccgccgccaaaacagccgcaaccgacaagtcggttgcaaaatgagaacgcacctttacaacacagaacggagatgatttatgacacgccacagctttattcagatgtcaaagctgtataatgtcaagggaagaatatcgtatattacaagccatgcaagacaggaaaacctctatgccacttaccgcaccgcagacaattccttttggcgaaaccttgcaaaagaatgtcagcaggaatttaagcgaagcaactcgccggggaagtgtatcgaagcaagggaattgataattgccctgcccgaagtttacaccacctatgagccgcaacaggtacttgaagatttcacagaggaatttcgcagacggtacaatgtggaatgtgtatcggcactccaccacaacaagagaaagaccaattaccacatccaccttatattcagtgaaaggcggctacttgccgagccggatataaagatcgccacccgaagcgtattctatgatgaaacgggcaagcgggtacgcaccaagaaagagatcaccgatgaaagcggcaaagtccgtgagggctgtaccgttatccccaaaggcggcatatacgaacagcaccttttcaccgtaaaggatgaccgcttcaaaagcgacccttttcttcgggaagtaaaggaaatctataccgcccttatcaatcggcatatctcagacctcgaacagcacctaaaggtgttcaatcccgacagtatctatctgccaaccaagaagattggcaagaacaatcccaaagccgcagaaattgaagcagacaatgccgcaaggcaggaatggaacagaacggcggatatggcactcatatcagggattgaagaagccaagatactggaaatcaagaaagatgagatccaccaaaaagcaagtcaatccattaaagcgaatggatggctgccaaatctgttccgcagtattgtgggcaaggcaaaggaatttttgcagaacctgataaggcagacggcactaccgcccaaaccggtactcaatatggatatggcagagttccgcacaatgcagaagctgatgatacgggtgcaggacagggcaagagaaatccgcagcttgcaggatgaagtacccaagttaaaggcacagcttgccgaaacaaagggtatattcaagggcaaggagcgaaaggcgttggaaacgcagatacagcagagggaagaaaaaatctccgctatgcttgaaacaatacccgatattctgaaagatgacggttatcccgacgtgcaagcatttatggcaacctactgcaaggcagaagtcatagttaataactacaaccgagagcttgcagaatgggaacgcaaggtcaaagaaaaaagcagacccgccgaaaaagaacggtatgcaccgccagaaaagcaaagtgtccgtgaccagctaagacggttgcaggcagagggcagacagaccaaacccaagcatcgatcccacgacagagaaagatagctttaacaccgaaaacaacaccgcagggcagtttccctgccttgcgggattacatattacgggcggcaaagagaaagccgcccctttcaatttgtatgaaaatcttagcgaacctattgacaattatagtctctatgcgtataatataattaacaatttggttaaatgttaagggaggatgtcaaatgggactgcaacagacattaaaagctcttgctgacccaattcgccgtgaaatactaaatatgctgaaaaaggggcgaatgtctgcgggagagattaccaaccatttctctgtaacagcaccttcgatttcaagacatctatcggtgttgaaggatgctgacttaatcagagatacaagagaaggaaagttcattttctatgaaatcaacacctctgttttggaggaaactatgctatggattgcagatttgaaaggggataatgataatgcttaaaaagaacaagattaaggttataatatcgtcaattattattttacttccggctttattcgggatcattatgtggaatgatttgcctgacattattacaacccattggggagctgacggcaatgcggacggattaagcggaaaggtctttgctgtctttggtacacctatcatacttttgattttccattttgtttgtttgctttttacttcattggataaaaaacaaaaagatcaaaatcaaaaagcattgggaatggttttttggattcttccgattatatcccttttcgcaaacggaataatgtatcgtgcagcttttggcaaagaatttgatttagcattttttatgccggctatgctcggagtaatgttcatctttataggcaattacttacccaaagttaaacaaaacagaacgctgggtatcaagatttcttgggcgttgaataacgaggagaattggaataaaacgcatagatttggcggtaaggtctgggtagttggaggacttattttattgctctccatttttcttcctctaaaagtgatggtatgggttgtagtatgtgtgattgctgctttggcgattattcctatagtttactcttatttcatttacaaacagcatcaaaaggaaggaattgtatatgctgaagcgcccaaaagcggtgcggaaaaaattgcgcttagaataaccgcagttatagtacccatcattttattaggtgttgctcttttaatgtttactggtaacatcgaggtaaagtgcgaagatacagcattaacgatcaatgcaacctattggacagacctggagatcgattattccgaaattgagaccattgaataccgtaagaatttagatgtaggagtgcgaacaagcggttttggttctcccaaactatctatgggcattttccaaaatgatgaatttggatcatacaccttatattcctatacaggtgctaaagagcatattatcttgacttccggcgagaaaactcttgtcattggaatgagcgatccaaaagaaacacaggcaatttatgatgcgatgttagagaaagtagacaagtaacgaaaatgggatgaaaagccatatttcaagctattttctgaccgcaaaaacagaggggtaaggtgtttgtaccttacccctcgattttgtgtattttggcgttacagtctcattttgcgaactttatcataacctcgtcaacggcatccgtatatctgccttgtgctatcagtctgttgctgaaagcaagcaaagcattgaagatataccgccgctcttctgctgtgaggtaaaggtaatacttccgttttctcatacgaagatcacctcggcattgacagtttccgtaaccgcagaccgcagattgctcattctgccaacccattccatttggttgtctgctttcagtttttcggtaatgccctcacgctctgcccgttgtttcataagatggtcaaacagttcctgtgcctgttcttcaacatcggcaaggtgggattgcagtttgccgcttgtcaacagcttgatgtagaacacttttctatgctcacggatataccgcaaatgccgctgtccccatactccgatatgcctttcttctttttcggcaggtaataccaaacaggggatgtaataatctccctgtaattcataccataagccgttgctgttatcgtaaatgtacttgtccattataaaatcctccagtataatatattcgcacatatgtcacagtttcctgattaccacattttgttatattgtgttacgagttttttcttcccttgatttttcccttatgaggtcacgagggaagcataaacaatagtgaaatcgtataaagggataaggcgagcacacagcgaaaaatcctttatttccaaggcttttggaggattttattgataacctataacctctgttaagaggtcataatttatagaaattcaaattccgatttgccggtttctttcaccgctgccaaatccatcatatcatgcgtttccatacagagcaataaaaaagatggaccgcagaaaatccgtgatggaattttcagagcattggcaggacttgttgacggagggcggctttggttggtggcggttgacgccgccggggagtttaagacgccgcctgcgcggcgggacgagggctttacgccgctgcgcggctacacctcatccgtcagcttcgctgacacctgtctccctgcgggtcggtaggttcgcgggtctgacaggccaccggcctgtcattcaacaccgcggaccccccaaggggaaggctaacgggggtcatatgcgctcgtaggcgcggcggggggtgccgtcggcgacgtggatggtgccggtgtacgcgaagccggcgcgttccaggcagcggcgcatggggtggttatcctcgtgggtgtccgcccgcagatggggacaccgcgtccacgcccaggccacggcctcggccagcacgccggtatgggtaccgtcgctgcccaggcggtggagggtgccgtatggcgtctcgtcatccagccacgcgccgtcgatgacctgataggtggggtcgtcgccgatgatgaaggcaaacacggcgtacacgccgcccgcgtcctccatgacgaacagccggccggcggccacgtccgaccggagcagggcctcggaggggtagccgttgacccactggacggtgttgccgctgcggcgcatgaactgccgggcgctggcgtagatctccagcgcccgggggatgtcgagacttgtcgcaggtcggatcatatcagtttttcaggctttgcagcggggcggggatacggccgccgcgggcgataaagtcggcgctggaggcctcgtggacgggcatcaggggcgcgctgcccagcaggccgcccatctccacggtgtcgcccacgtccgcgccctccacggggatgatgcggacggcggtggtcttgctgttgaccatgcccacggcggcctcgtcggcgatgatggcagagatcgtctccgccgtggtactgccgggcacggcgatcatgtccaggcccacagagcacacgcaggtcatggcctccagcttgtcgatggtcagggtgccgtccagggccgcggcgatcatgccctcgtcctcggagacggggataaaggcgccggacaggccgcccacatggccgctggccatgacgccgcccttcttcacggcgtcgttcagcagggccagggcggcggtggtgccgtgggtgccgcagacggacaggcccatctcctccaggatgcgggccacactgtcgcccaccgccggggtgggggccagggacaggtccacgatgccgaagggcacatccagacggcggctggcctcggacgccaccatctggcccatgcgggtgatctggaaggcggtctttttgatagtctcggccaccacgtcgaagggctggcccttgcagccctgcagggcgtggtacaccacgccggggccggacacgcccacgttgatgacggtgtcggcctcacccacgccgtggaaggcgccggccatgaaggggttgtcctccacggcgttgcagaacaccaccagcttggcgcagcccaggccgtcacggtcgcgggtcaggtgggccgtctccttgatgacgcggcccatctgggccacggcgtccatgttgatgccggccttggtgctgcccacgttgacgctggagcagaccagctccgtgcgggccagcgcctcgggaatggaggcgatgagccgccggtcgccggaggtaaagcccttctgcaccagggcggagtagccgccgatgaagttgacgccgcaggtcttggcggcgcggtccagcgtcagggccagggggacaaagtcctcgcttttacaggccgcgccggcaatggcgatgggcgtgacggagatgcgcttgttgacgatggggatgccgaactcgctctcgatatcgcagccggtttggaccagcttttcggcgcgggagcagatcttgtcgtagatcttgtcgcagcagcggtccatgtcctcgtcggcgcagtccagcagggagatgcccatggtgatggtgcggatgtccaggtgctgcttgtccaccatggcaatggtgtcgaagatgttttgcagactcagcatattcccaccccttacagcttgtgcatggcgtcgaagatgtcctcccgctggatgcggatggacaggccgcggccctcgccgtaggccttcagatcggcgcgcagggcgtcgaagggcgcctgacactcggtcaggtccaccaccatcatcatggtgaagtagccctccatgatggtctggctgatatccaggacgttgatgcggctggccgccagggtgttgcacacaccggcgatgatgcccacctggtccttgcccacaacggtaacgatcgctttcataactatagactcctctcggatggttttttgttttggcgcgggaggcgcggtttgccgaaaaccgatggatcccgtgtcctgtcgatggcaggccgacgacggcgtatcgggtatacgtcgaggagacctgacgatggcagggcgcgggaggtgcggtttgctattccagttcgtctaatgtcagcgaatagctgggcaggaaatgctcgcggaaatagtccagctccggcagggccatggcgtccatggcggcggcggtctgggcggcggcctgacggaactcggtgttgccggccttcagctcctcgatgcacttgatgtgggcggagagcttatccgccgccctcaccagctgctcgatctccgggtcggcgggacggagggcatcctcgtaggcgggacgcaggtcctccggcagcatggagaggagcttgtcctccgccacctgctccacggccttgtaggcgtcgcggatgccggggttgtaatacttgatgggggtgggcatatcgccggtgagtatctcgccggcgtcgtgatacagcgccgccacggccacggcgccgacgtccacctggccgccgaagcgctcgttgcgcagcaccgccagcgcgtgggccagcaccgccgtctggtggctgtgctcctggatgttctccgtgtagctgttccgcatgagcgaccagcgctggatgaagcgcatacggttgatataggcgaaaaagtggttcatgttatgtcaactctcctatcagtacatcaccatctataccgactatttttgtatcgataattttattatgtaaatcttcggcgcggacgcacacctcacagtagttgggggcgtggccggtgtagaggccgtccttctcctgctcatagagcaccgggtaggtctgccccacgcagccctccagataggcgcggtgcatggtccgggccacggccacggcgcggcgggtccgttcctcctttaccgcggcgctgaactgcaccagctccgccgccttggtgccgggacggacggaatagggaaagacgtgcatatccgcgaaggcgcacttttcgataaaggccatggtctgtccgaactccctgtccgtctcgtcggggaagccgcagatcagatcggtggtgacggcgggccggtggaaatactgccgcagcagtgtgacggactcgtaaaaccgtgccgtgtcgtacttccggttcatgcggcgcagcgtctcgtcacagccggactgcagggacaggtggaagtgggggcacaggttgggcagcttcgacgcccggcggcagaagtcctcggtgatggtacggggctccaggctccccagccgcagacgcatatcccccgcggcggcggataccgcctccagcaggtcgatgaggctttggccgtttttcagatcgtggccccaggaggatatctcgataccggtgagcaccagctcacggtatccctcgcgccgcagctgctccgtctgggctacggccgtcgccagcggcagggagcgcaccggaccgcgggcgtaggggatgatgcagtaggtgcagaaattcacacagccgtcctctaccttcagcatggcccgggtgcgctcggccatgccgccggcgggcagcacctcgaattcccggcggcgcagggcgtcgtccaacagtctcaccggctccttctcgtgggctgcctgctcgaacaggtccagaaacgccatgcggtcaccggtaccggccagcaggtccacgtccagtgccgccaccacctccgggtgggtctgcacataacagccgcaggcggccaccaccgcgttggggttcagcttatgacaccggcggatcatctgccgggatttcttgtcactgatggcggtgacggagcaggtgttgacgatatagccgtcggcctctgtctcggcgggcaccagcgtatgaccgcggcgcagcagctcctgctccatggcctgtgtctcgtattggttcaccttgcagcccaaggtatagatggcaacacgcatcttgcactttcccctattctatcgtataataaggtttcacgggtgaaggtgtttttcactcccgctttttgatcggtttattatactgtattttaccgtgtctttcaagacccgttcgtgaaacaggaggctctctatggtctattttgataacgccgccaccacgccggtgcccaaagccgtggccgacgccatgtacgaggtgctgacggcgcactttggcaatccctcctcccaataccccataggggtggagatgaaaaaagccgtggagggctggcgggccgtcatcgccggggcgctgggctgccccgcagagcgcctgtacttcacctcctgcggcacggagagcgacaactgggccatacaggccgccctgtggcagaaccggcacaggggcagacacatcatcaccaccgccgtggagcacagcgccgttctggagccctgcaagctgctggcccagcaggggtatgaggtcacctatctgaagccaggacgggacggcaatgtcaccgccgaacaggtggcggatgccctgcgggaggacaccgccctggtgtctgtgatgctggtgaacaacgagacgggctgcgtatttcccgcggcggacatcgctgccctgctgcgggagaagggctcccctgccctgctgcactgcgacgcggtgcagggctttttgaaggtcccctgcgacccggagggctggggcgtagacctgatgagcctgtccggtcacaaggtcggcgggccaaagggcgtgggcgcgctgtacatcggtccccgggtgcggaacccccgccccctgctgcccggcggcggacaggagcgcggcgcgcgctccggcaccgaggccacggcccagatcgccggctttgccaaggcggtggagctgcggctggccgattatgacgccaagctggcccacatggccggactgaaggcctattgccgggagaagctgctggccatgggcggcgtggtccccgtgggcgagggtacggccccccacattctggcggtgtcgctggtagggtatcccagcgccaacatcgtaacggacctgggtgcgcagggcatctgcatctccgcaggctctgcctgccatcaggggaaggcgagccatgtggtctccgctctggggctggacaaaaagactgccgccggcgtgatccgtatctccttctcccctgacaatacacgggaggacgtggatgtcctgtgccaggcgctgctcgcccaccgggacagccgcttccccatgctttgataatccaattttcttaatgaggtgaaccatgctgcaagctctgaagcgcgacaaggccttctacggatatctgctccggctgaccgggcccatcgccctgcaaaacctgatcactttctctctgggcctgatcgacacactgatggtcagccagctgggcaacaatgagatggcggcggtaacagcggccaacgtgccggtattcctgctgatctccatcgtgttcggcgtccagtccggcgtgggcatcctgatcagccagtactggggcaaaaaggacctgaccagcatcagccgcgccatcggcgtggcggcggggctgggcgtggctctggcgctggtcatcgcgctggcgctgttcctgtggccagtacagatcatggacctgatgagcaacaagcaccatctgtccctgcttggcgcgccgtacctgcgggtcatcggcttctcctatgtgttcaatatgctctcgtctatctacgtcagcgcgcagcgcagcgtggagaacgccagcttcggcatgaagctgtttggtatgtccacagtgctgaataccggcatgaactacctgctgatcttcggcaagtgcggctttcccatgctgggcgtggagggcgcggccatcgccacgctgctctcccgcgtggcggagttcgccgtatgcctgttctgcgccctgcggagccgggtcatccccctggacctgaaggcgctcctccgtccgggctgggagatgctgcgccggttcgtgaaatacgcctcgccggtgatggccaacgagctgttctgggggctgggcaacagcctgctcaccgtcattctgggacacatggccatctcggtagagtttctggcggccaacgccgtcatgggcaacctgaaccgcctgttcctggtggtgtgctttggtctgggcgccgccaccgccgtgatgatcggcaaggccatcggtgagggacagagccacgatgagctgatggacctgtccaggacgctgtcctgggtgacgatactggtgggcgccgcactggccgtcatcgccctggcgctggtaccgctgctgttccagccggtggtcttcccactgttcaagctgtacgacctcagtgcccatcttgccaccacccttgcggtgacgggcttcgcctgcatccccttccacgcctactccatctccgccgtcaccggtatcctgcgggcaggcggcgatgtgttctggtccacggcactggatctgggtccccagtggctggtggcgctgccgctgacggccctgctggcgctggtgctggacgcggatccctggttcgtgtcgctggccatacaggcggagagctttatcaagtgtcccatctgcctgtggcgcatccggtcccgtaaatggatacacgacgtgacactgccggagggtgagcgatgaacagtctgttcgtctgccccatgtgcggcggcgcgctgacgcggcgggagggcagctatctctgccccgccggccactgcttcgacatcgccagggagggctatacctatctgctgccggtgaaccggaagcactccaaaacccccggcgatgacaaggctatggccgcggcgcggcacgcctttctggaaaagggctactacgccccgctatgcgaagaattatgtcaactcgctgtggagttgaccggcgatgccccggcggtgctggacaacggctgcggcgagggctactacaccgcgggcatctatcgtgccctgtgtgaggctgggaagacgccggtgatggccgggatcgatatctccaagcccatactgcgtctggcagctaagcgggagaaaaacgtgcagttcgctgtggcctcctcctaccgcctgccggcggcagacgggtccgtagacctgctcatcaactgcttctcgccgctggccatcgaggaattccgccgtgtgctgcggcccggcgggcactttatctatgtggtgcccggagaaatgcatctgtgggagatgaagcaggtgctctatgaccacccctatgtcaatgaggtgaaggagacgccctatgagggcttccggtatgtgagcatccgacacgtacgggacgttatccatctggaggatccggcggacatacaggcgctgttcggcatgacgccctactgctggaaaacgccgaaggccggcgttgaaaaattatgtaaactcacgcggctggactgccgcatcgcctttgacatacacgttttcgaaaaggagggataactatggatcgaatttccccgccccgccgccggccgcggcggcgtctgctgccggtgctgctgctggtcgcggcggtgctggtggttggcggactgctgacggcggtcgttctgtccctgcggggcggcagcgcccggcaggagccggaggccgatccccacgcggggcaagtatatatcaacgacggatttaacatggtgtggatgacgccccatgagggtatccccgccagcggcctggcgcaggaggacttccgccgggacaccaacgacgacggcagcgacggcgtccgcgtccgctatctgggcgcggaatacgccacccgctggggcgtggacgtgtctaaccaccagggcaccatcgactgggcggcgctgaagcggcagggcgtcgactttgcctatctgcgcctgggtctgcggggctacggcgagaagggctccctgtacccggaccggtccttcgacagctattacagcggggccagggccgccggcatcgacgtgggcgtgtatttcttctcccaggccgccaccgtgcaggaggccgcccaggaggccctgtacgccctgcagctgctggatggccgcgacctggacctgccggtgtactacgactgggagccggtacagcaggaggactcccgcacactgcacaacaacgaattcctgctgacctcccaggcccggactttctgcgccttgatcgaacagggcggctatgaggccggggtgtacatgaaccgccagcagggctactaccgctatgatctgccctctatggggaacatcgccctgtggatcgctgatcccggcgactatccggacttctactaccgcttcgatgtgtggcagtatgaccacggcgcacggctggacggcgtcaacgagatcgtggacctgaacgtggagttcgtgccggtaatgtaagcaagagcgctcccccggcgggggagcgctcttttattcgaacagctttccgcaggcccagttggtaaagggtgcggcggcaaacatattccagaaaaacgccatggggaagttcttgataagcgtccccgcccagatggcgggcagctgccacaccggcgcaccgcctaagatcatgctgaaaataatggtggccgccagactcatggttgggcacataatgtttatattatgtaaacttgtttttgtgtccacgaccttaccgtaccagaatttccgcaccgggtcatacagcactgcttacaatcgccgcagccagacattacatcctccccacataaaccaaaagaccggctttcgccggtcttttggtttacataatttagtttttcttcccgtgctgcgccttcatgcgccgctcgtggttcaggatggtcttgcggatgcggaggttcttgggggtgacctccagcagctcgtcatccgccaggaattccaggcactgctccaggctcatcttccggggcggcaccagacgcagggcgtcatcgctgccggcggcacgggtgttggtcagctgcttcttcttgcagacgttgaccacgatgtcctcctgcttggggctgatgcccactaccatgccctcgtacacgcccacgttggggccgatgaacagcacgccgcgctcctgcgcgttgaacagaccgtaggtgatggactcaccggtctcgctggccaccagagagccggtattgcggcgggtcagctcacccttatagggggcgtagctgtcaaacacgctggccataatgccctcgccccgggtatccgtcaggaactcgttgcggtagccgaacagaccgcggctgggcaccagaaactctaccttcatgcggcttccgatgggggtcatttcctgcatatccgccttgcgggcgcccagcttctcgatgaccgcgcccacactctcggcgggcacgtccaccaccaggcgctcgataggctcgcactttttgccgtcgatggtctggtacagtacacgggggggcgacacctggaactcgtagccctcgcggcgcatggtctcaatgaggatggacaggctcatctcgccgcggcccgccacgttgaaggcgtccataacgccctcgatctcgctgacgcggagggacacgtccttcagcgtctcgcggaacaggcggtcacgcagctggcggctggtgacgaacttgccctcccgcccggcgaagggactgtcgttgacggagaaggtcatctccaccgtgggggcgctgatcttcacaaagggcagcggctccacgcagtcgggtgcgcagatggtatcgccgatggtgatatcgccgatgccgctgagggcgatgatgttgcccgccgtcgcttcggtgatgggcaccttgcccagaccggcgaactcgtacatactgacagccttggccttcttggccggggcgtcggggtcgtggtagttgcacacggcgatctcctggttctgcttcagcacgccgcgctcgatacggccgatggcgatacggcccacgaactcgttatagtcgatggagctgaccagcatctggaagggctggtccaggtcggcctccggcgcggggatgtagtccagaatggtatcgaacagcggcttcaggtccgtgcccaccacgtcgggggaatagctggcggtaccgttgcgggcggagcagaacagcatagggctgtccaactgctcgtcggtggcgtccaggtccagcaacagctccagcacctcgtcgatgacctcgtggatacgctggtcgggacggtcgatcttgttgataaccacaataacacgatggccaagctccagcgcgcggctgagcacgaaacgggtctggggcatagggccctcggcggcgtccaccagcaggatgacgccgttgaccatcttcaggatacgctccacctcgccgccgaagtcggcgtggcccggggtatccacgatgttgatcttggtgtcgccgtactggatggcggtgttcttggccagaatggtgatgccgcgctcacgctccaggtcgttggagtccatgacgcgctccaccgtctcctggttctcgcggtacacgccgccctgcttgagcatctggtccaccagcgtggtcttgccgtggtcgacgtgggcgataatggccacgtttctcagtttttcgttctgcaaaggtaaaaacccctttctctcgggtaaattcactaacctttgtattatatgcctgcaaaggaccgattgcaagccctttcgtcaactttttcgccgcgccgccgttgacaaatgccgccgcctacggtacaataccagttgcacacgcctccgtagctcagttggatagagcgaccgcctcctaaaaatcgaatcgttcgaatcctggagccctgtaaaattgaatatttgttgtataagcccccgtagctcagttggatagagcggtcgcctcctaagcgacaggccactggttcgaacccagccgggggtgccaaaaatgaccgctgtaagccgtttttcgatggtttacagcggttttttgttatcgtttcttcggagcattcttgccgctccgccggaacgattttatacattttccgctgtatgcctgctaattggcttcgaactatttttccggccttgctaataaaaaacgccgatttgctaatacgattttcccgccctatttttcggatggggccgacaccagcaatgcagccagtgtgttggccagttccggcgacttgcgaagctgttccaccagggcctccaaatccaatgtggcgggagccgattcctttggttcttccgggggacgaaccgaacgcagatcaggattggcatagaaggcgctctcaaacttctgggtgttgatcttccgatcctcgtccagaatgtgggcatacacgctggtgatcatgtcgatctgagcgtgtccagtatcgccctgagtggccttcaggtcgccgtggttcagcttcagcttataggtggtgctggaatggcggagggagtgaaagaccacttttggctgtcgtacatgggcacgccccaccgcttttcgccgtagagggaaacaaagtcggacaggaactccgcaatatcgactggtcaaagccggcacactggcggccataaccgtgttcagaactgtgcataccagcagtcccggaagtagggtagaaacgccggtttttctctttctaatcagccagaatccagaccaaagtaatgtaatggccggaaatagaatgtttccccagaacatgagtttggcagggatagcaaaacggccatcatagtagaatactattatttgcctaattaagtcaaattttttcgttgaaaggtcaacaaatctcaaaaagccggttcgcagcacacttatagcgcacacgccgacaaaagcgaaccatcctaccacgccgcacgcttccctgtttttcttcaccgctgccccagttgttccgtcacggcaaagtggtttttctcataccggatcagcccgtcccgctgcatgagggacagctcattgctcagcgcgctgcgctccacgttcaggtagtccgccagctgctggcggttgtagggtatgtcgaattcatagctgccggtgcgcttgatgcactccgagaaataggacagcagccgcttgcggatggacttgggcgaggtgtgcagcacccggcgtgagagctgcaaattcttcccggcggagagggtcagcaggttccgcagcagccggaaatggcggggacacaccttggcgcagggctccagcacctgcccgatgtgcaatagcagcacctccgtgtcctcggcggcggtgacgttgaccatcagcggctcacccggcgcgcaggcatacgcctccgcaaagatgccgcccgcgcccacgctgctgaggacgctgttgttgccccacacatcccccatctcgatgatgacacggccggacagcaccacacccagctgctccgtaggcgtcccctccggcaggatgaccgcgccctttttataggtgcgctctgcggcgcgcaggcagcatagtatttcctcgatgtccggcggtgtcatgccgcgaaaaagcggggtgttccccaaattgatccgcatatttttctccttttcgttggcgtgccaacagactttcataaattatgatagtaaaatgaagccacaaagtcaagaagaaccgcaaggaggacaaaaatatggtacggagaatcattgagatcgacagggacaagtgcaacggctgcggcgcctgcgccgaggcctgccacgagggtgccatcgccatggtggacggcaaggcgcagctgatgcgggacgactactgcgacgggctgggagactgcctgcccacctgtcccaccggggccatcacctttgtggagcgggaggccgccgcctacgatgaaaaagccgtcatggagaacaagcagcggaaaatgcgggagcagggcatgacgctaccctgcggctgccccggcagccagtcccggaacattcagcgcgagaccgcgcccgccgcggaagccccccgcgctgagcagacgagccgtctgtcccagtggccggtgcagatcaagctggtgccggtgaacgcgccgtattttgacggagcgcggctgctgatcgccgccgactgcaccgcctacgcctacgccgccttccacgagcggttcatcaagggccacatcacgctggtgggctgtcccaagctggacagcgtggactatgccgaaaagctgacggagatcatccgcagcaacgacatcaagagcgccaccgtcgtccgcatggaggtgccctgctgcggcgggctggagctggcggcgaaaaaggcactccagcagagcgggaagttcatcccgtggcaggtggtcaccgtcacggtggacggtcggctggtggaggagtaaaacacaggagaacacaaaaggagaaatattatgaaatacgtttgcaccgtttgcggttgggagtacgacgagagcgcagggtacccggagggcggcatcgcgccgggaacgccatggagcgaggtgccggaggattttgaatgccccctgtgcggcgtgggtaaggacagctttgaggaggcgtgaactttctgaagggcaggagccaagcgacaagcgataaagcccgaaaacggctgcgcggctgcggggagaacgctctccgcagccgcgcagcttttaggcttggttctttttcgcagagactttcttcttgctgcccctgccttttgccataatcgctttattttcagcgaatataagatatattcccattaaatccccgttcttaacaaagattttaacccattcgctttattatggtaatagaatgcagcgtgtctgtcccaccagcgccgccctcttccgctgcggccgtggagacagtaaaaataaacagtccttgcggcagaaacgccgcagaagaacgacgacaaagatcaaggaggctattatgaagaaaaagaactgtaagctgacgggcattctgcgcgtcattgccctgcccctggtgggcagtgccggagggtttctgtactaccgctatgtgggctgcgccaccggcacctgcgccgttacatccagcccgtggctctccaccggcttcggctgcgtccttgggtcgctgctgtataccgtcctgcggcccggccgcggcaggaggcaggacggcgacagggcggagtgacccttgctccccctgaaaggaggaaacgccatgtatcgaagcatattggtccttcttttcgcctcggtactgctgctcagcggctgtgccgcagaacggcagcatataccgcgggaaaaggacacgcaggaagcggagaaaaccggacagtcctcggatatgtccggcgaggagggtatgtatatggacaccacggaaaatgtcatctatctggcaggcggctgcttctggggcatggagcagctcatgcaatccatccccggcgtcatcgacgcccagagcggctacgccaacggcacctgcgaggcggatgccacctaccagaccgtctgcaagggcgacaccggctttcgggagaccgttcgggtggagtatgaccccgagcaggtaagcctggatgccctgctgctggcttacttctatgtgatcgaccccacggtgcagaaccggcagggcaacgaccggggcagccagtaccagaccggcgtgtactacaccaacgaaagcgcaagagaaacagtgaagcgcatcgcggacatcgagcggggccgcagcgagaaattctttgtggagatcggtccgctgaagaattactatcccgccgaggaatatcaccagaactacctggaaaagacccccaacggctactgccacatcccccgggcggagatggagctgttctccatgcttcgcatcgatccgggcgactaccggaagcccgcggcggagaccatccgggacacgctgacggcggagcagtaccgcgtcacgcaggagagcggcacggagcgcgcctttacgggcgagctctgggacaagttcgaaaagggcatctatgtggacatcgtcaccggcgagccgctgttctcctctacggataagtttgaaagcggctgcggctggcctgcctttacaaagcccatcgagagtcctgctgtggtggaacgggaagacttgagccacggcatgcgccgcacagaggtgcgcagccgcgccggcgactcccatctgggtcatgtgttcaccggcgatccggagtctcccaacggtgtgcgctactgcatcaacagcgccgccctccgcttcgtgccttacgcgaggatggaggccgagggctacggataccttctgaatttgtttgagggataggccgggcacggatatgttgacgcagcagaaaagaaagcccccgctcgactgagcatgccacacaagccagctgaccctccgtatgcttcagtacatacggagggtcagctgctgttcgtaatgaaatcctgttgctctgaaggagctttttcggtttgataagcgggaaatctttttgcttttttctatcgctttttcacctggcatttgccgctgccttttcgccgccgaaaacagagcgcggatcattcagctctgccgcagcccatttcagcggagcagacactatccgcgctgacggttaatttgcgacgaatttgcatattgacatcggggcgacatcatgttatgctgaattgcaaatgaattgcaaattggaggcgtggtgacttgtccagttacagcacgcggcagaggaaggctctgcttgcctatttgagccggcacccggatgagctgctgtccgcacggcaaattgcggacgcgctgtcggatgaaaagatcagcctcagcgccgtataccggaaccttgcacagttagaggcggaagaaaaagtgcggcgcagcagcaagagcggcacgcgggaggtctactttcagtaccttgacgccgagagctgcaagggtgcgctgcacatgagctgtgtaaaatgcggcaggacctttcacatggcaagcggcaacgccgccctgtttgcaaagcacctggcgcagagcgagcaattcacgctggacgccgccgacacggttctctatggcacctgcgcggattgcagggaagaataatatttggaaggaggacaggctatgacaaagaaatctcgtttgatcacaggcttgctggcagccgtgctggcggctgtcatgctgtcctctgctatctacattacggtcgaagccaaccacaactgctccggcgaggactgcgccatctgccaccagctgcagatctgtgaaaatctgctcaagagcattggacttgccggtgctgccgcggttttcgccgcggcggtcaggtatgccccgtgcagagtcattccctcctgcgcggagcttgtccgcacgtttactttggtttcgctcaaggtcaagctttcagattaaataagaactatttacaagggtgtagtctatccgttttcggataggctttcgcggcgttgccgttacccttgtatttttgcgcccatttttacgttcttatcataatctggaggtacatatagcctatgaaaaagataactgcgctgctgcttgcgctaatgctgctggccggcatccttgccggctgcggaaagccgaaggataccggaaaagccggcaaattgaaggtcgtcacgaccatcttccccgaatacgattgggtcagggcgatccttggcgacaaggcggataacgccgaggtcaccatgctgctggataacggcgttgacctgcacagctatcagcccaccgccgatgatattgtcaagatctccgattgcgacctcttcgtctatgtgggcggcgagtccgacggctgggtggaaaatgctctgaaaaacgccgccaacaagaatatgaaggtcatcaatctgctggaggtactgggtgattccgtgaaaacggaggagaccgttgagggtatgcaggaggacgaccacggtcacggtcacagccacgatgaacagctcacggagaatgacatcgaggatcgcaccctctcggatttcgccggtgcgtggaagtccctgcacccctatctgctgaacggcgacctggacaaattctgccaacacagggcggaggaggacgaggacagctcgaccacaaaggatacctacttggagaagtacaaaacctcgtggcaatgcgacgccgagaagatctctatcaacgggaacacgatcaccttcacttatggagacggaaaaaccgtttccgctgaatacacctatgccggttatcagccgaagctgaatgacgagggtaagatccgcagcgtccgctatcagttcgaaaccaccagtgccgatgcgcccaaatatgtgcagttcaacgaccacggccacgagccgggccaggcggagcatttccatatctacttcggcaacgacggcttcgatgccttgatgaacgccaagaccaatccgttttttgtgaaggatgcgctttccgtagaggacatccttgacgagctgatggggcatgaccatggggaggaaatggacgagcacgtctggctgtccctgaagaacgcccaagcactctgcgtgacgatcgcggatgcactgtgtgccatcgacccggacaacaagaatacctatatagccaacgccgcggcgtatagggacaagctggccgcccttgacgcagactataaggcggccgtggacggtgcgacccataagaccgttttgtttggcgaccgtttcccgttccgttatctggtggacgattacggtctgcgctactacgccgcctttgcgggctgctccgccgagaccgaggccagctttgaaaccgtttcgttccttgctaagaaggtggatgagctgggacttccctgcgtgctgaccatcgagggcgcacagcacaggatcgcggaaaccatcgttcagaacaccgctgggaagaatcagaaggtgctgaccatggattccatgcagtccaccacctccaaggacgtggcaaacggcaccacctacctttccgttatggagaagaatctctccgtgctgaaggaagcgttggggtaaggaggtaggtttatggctcagctcacttgtcaaaatctctgtgccggctacgatggacgacccgttctccaagacctcacctttgagctcctggcaggcgactatctctgcatcgtaggggaaaacggctccggcaaaagtacccttatgaaaacgatcctcggcttgcaggcccccatcagcggcagaattttgacgggcgatgggctgaggaaaaacgagatcggctatctgccgcagcagacagtggtacaaaaggacttcccggcatccgtgagagagatcgttctctccgggtgccagggacgctgcggcagccgtcctttctataacaaaggagaaaagaaacttgcggtggacgccatggagaaaatgcagattacacagctcacaaggcggtgctatcgggagctgtccggcggacagcagcagcgggtgctgcttgcccgcgcactgtgcgccacacaaaaaatgctgcttctggatgagcctgtttcgggacttgaccccaaggtgacggcggaaatgtatacgctcatcgaaaagctcaaccgtgaggacggcatcaccgtgatcatgatttctcacgatgtggccgccgccgtccgatacgccagccatattctgcatattggcgacaccgttttctttgggacaagggcggactatctccaaagcccgcaagggcggctgtttgacgcgcagaagggtggtgacagccaatgaccgctatcttggaaaagctggctctctattgggcatatccctttgtccgctatgccctcattgtcggtgtgctgatcgcgctttgctcctccctgctgggcgtgacgctggtgctgaaacggttttccttcatcggtgacggtctgtcccatgtggcgttcggcgcaatggcgattgccgccgtgctgcagatcaccaacaaaatgccccttgtaatggtcattaccatcctcagcgccgtgctgctcctgcgcaccgggcagaacacgaaaatcaagggcgacgccgctatcgccatgatctcggtgggagcacttgctattgggtatcttctgatgaatattttttccacctcgtccaatctttcgggcgatgtgtgcagcacgctgttcggctccacctccatcctgacgctgtcccccgtagaggtatggctgtgcgtggggatgtcggtgctggtcgtggcggtgttcatcctgttttacaacaagatcttcgccgtgacctttgacgagagctttgcaagggcggccggcacgagggcggggctttacaacctgctgatcgccgtcgtcgttgcggtcatcattgtgctggcgatgaaccttgtgggttccctgctgatctccgcactggtgatcttcccggcactgtccgccatgcggatgttcaagagctttcgcagcgtgaccgtctgcgcggcagtcctttcggttttctgtgcgctgctcggtattctggcgtccattctcgccggtacgccggtaggctccaccatcgtcgccgttcagatcggcgctttcggtctgtcgtggctggcaggcacggtattgggaggtgttcgcagatgaaaaaactattttgctttctgttggcagccctgctgctctgcactctcgctgcctgcggccatgagaataccgcacagaagcccgctgcgggggatgcggaaggcaccgccgcggtcgacgtagacctgactgtgctcagcggcatcatggtctattctgaggtcaacagcatcatatcctttccggataactacatcggaaaaaccgtcaaaatgcaggggcagttcaccatataccaggccaccgacgaaaacggtgcttttatcccgggcaaaatgttcttcgcctgcatgatcgccgatgccaccgcctgctgcgcacaagggctggagtttgccctcgccggagagcccgtctatcccgatgagtatccggagctgggggcggagatcaccgtggtgggtacgtttgaatggtacgaggaggacggctgccggtactaccggctgggtaacgcatcgtttgtgaactgaggcagcgtgggctgcatcaaccggaaattccgtgccgcgtttcgatcacgatataagcagcagtcccccggacaatgaaacgtccgggggactgctgcttatcgttagatgtccattgtcaagaggtatgcggcacccgttgccccatcgtatacgcacagggaaacatttgtgtatgcgcttgtccccgggtttcgatctaccattttccagtagccgtccgcgattgagggcagctccgcataggcggaaaggctctccaaaaagcactcagcctcttcggagaagggaaagcgttcccattgtaggaacgcctgacgcacgtcctccccaatggtcagcttatatagtgctattccctcataaggaaacccttcgtagttattgaagagttcctcaagcacacagtctttcttttcaatatgcaagccaaaatcccgcataagctgcgccttgggatcaccaaggcgatttgacccgcacgacaccagaagcattccgatacacacgagagccataacgcatattagctttttcatgatttgctccttgtgtatcactccttaattggagggtataagaatcgctgcgggcccatatacggcctgttgcggtctgtctgcacctcacctgtagaagtcataaataccgcttgtgtcgttcaccaagcacgaactattcctttcgattggctacagcttgcaggcagatcgacaagaggattgcacaagaaaccgcataacttgcaaccgtcattccaaccgttccgaacaggaatagcggaacaatcgaaaacagtaatgagataatgctgcaaacaaaaatagtttttctgatgctggcagctctatcaaacctgaacaaggcgattgcacccagcaagataatcaaaattgtcaggattcctgtcaacagcggcgtgaaattcgcataccctacggggagcagactgaaatatgaatacacttcaatagtttgtttggttggacttgtcgcgaacaccatgaccacaccaatcggcagtacctctaacactaacgcgataccttgtaacgcaagagccgccaaataatacactctatccgttgctttcatcgaatacccccgctttcgtgtgtagatgtaaagaattgctattgcaacaatgataagacccagtgtccagatataacttttacttgctaaaaatagcggtgaaattatgaaagcgatgccaataatgaaaatggttacacttattacacttgcaagcatacgctttgaataattcagcgcctccaaaataatattgtcagcccgctctttcatatctacctcctctatcttttttccagacagcaattcagtgacggaaacgcctaaaacatctccaaggggttttaacaacgaagtgtcaggaagtccttttcctgtttcccatcgtgaaattgctttatctgttaccataagattttcggccaattccttttgtgtaaagcccttttgttttctgagttcggcaataaagcggcctgttgtgttcttatccacatgctcacctcctgctgaaaacattttaacaaatcaccacttagaattgaagcctatgaatcgtagagttggcactttttcagtcttcaaaggggatattcttataaacattataccttaaagaagcaaatccttctatcgccatctattacagctaaataactgccgcccatcatagcggcacacgaagcagcaagtcttgaaaaggattggctgcttttgaattacatctacgtggcatatccgccgctgaagcaaccgtcagcggcgggcatcatttctcactccgccaatgccttgcccaaggcgcggcaggcttcaagtgccgcgtcatcgggcgtctccatgcagatcacgctctcgcaaacgagattcacccctgcgttgtcgcagtcactctcccaggtgcgcatccactcgccgtcgccccagccgtaggagccgaacagtgccacgcgtttgccgccgaggctgcgcttgcacgcatcgaacatgggctggaactccatttcctccagcacctcgctgcccatggcggggcagccgaaggcgatggcgccgtaggtgttcagattgccgggctgtacctcggcgggtgtgaacagaacagcctccgcgcccgcggcggtcatgccctcggcaacagcccgcgccatggcctccgtattgcctgtgccgctccaataaacaacagcagttttgattttcgtaaattcctttcttttgatgattttatatgatcaaactgcaacggcaagctgctcaagcttcaagccgctttgccagagcgcgcagtagatctccgtgcattttttgtatttctcgaatagcgagcgtgctttttcctcgtcgccatagaccttccaaagccccgcgcatttgaagccgcccgcacggtggttgatgaaacccttcacgtcctccggcggatagctgagaaacagccccacctcatgggggaactctttgccctcacggaagcggcaggcaagccgcgccacacagcgcgcacagctctcatcgccataacccgcctgccgcagcagcttggatgcctgcgcgtcccgcagatcccgccgcagtccagcggggcgatagaggtaaagaagtgcctgccccggcagaaagcagagcggcagcaggcaaagccccttgggcgacagccgccgattcagccgccggatatccgtcatcagtgcctcgtgatcctcgcaggggaagggaaacaagctccccgtcttgattcccgccagtgtcggcgcaccttgacggatcagtatttcttcagacattcgctctcaactcctgcggtagtcttgtgcatcaatatcgctccgtttccttggctcatttcgcagttagtctcctctaaccgccatgctttggagtggggcagggatacagctttcagtttccctgccccgattccttataatttgttttcgtccagcaggtcggtcatattccgcaggctgatgcccagcgtggagccattgtgcagcaatgccgaggtggtgggcggcagtacccccgccacacccagtacgatcagcgtcaggttgaagcccacgatgaagcggtagctgccgtggatacgctccatcagtgcctcaccgagcctgcgcagtgttaccagcgcaaacagatcctccgaggaaacggtgatgtctgcgatctcccgggcgatggccgcaccggtggagatggcgatgcccgcgtccgcctccgacagagcaggggagtcgttgacgccgtcgcccaccatgataacggtgtggcccttcgccttttcctgccggataaacgcggccttgtcctccggcagcacctcggcatacacggcgtccacgcccacctcggcagccacagcctccgccgtgcggcggttgtcgccggtcatcatcaccacgttggcaaagccgctctcgtgcagtgcccttatcgcctcccgcgcctcccggcgcaggggatcgtggatgcagatcaccgccgccagctccccgtctatgctgaggtacaagtgggaatacgcggcgggcagcgcgtcaaatttcggctgctctccctccgggatgcggcagccctcgtcctcaaagacgaagtgggcgctgccgataatgaccttcttgccctccaccatactggagatgccgtgggccaccacatactgcacctgcgaatggtactcctcgtgggtgagcccgtgccgctttgcctccgctaccacggcgtttgccatggaatgtgggtaatgctcctccagacaggcggcaaggcgcagcatttccgcctcgttgtgtccgccgaaggggatgaccgccgccacggtgggcgtcgcataggtcagcgtgccggtcttgtcgaacacaatggtgtccgccttggccaccgcctccaaaaagcgtccgcccttgacggagatgtgatagccgctgctctcccgcatggcggacagcaccgcgatggggatggccagcttcagggcgcaggagaagtccaccatcagcaccgagagcattttcgtcacgttccgggtcagaagatacgtcagtgccgtgccgcccagcgtatagggcaccagcctgtccgccatccgggacgccttgtcctcggcggtggatttcagcttctccgactcctcgatcatgtgaaccacccggtcataccgcccgctgccggaggatctctccacggagatgacgcactcgccctcctccgccaccgtcccggcatagacgggactgccggggtgcttggccacaggcatggactcgccggtgagggaggactggttcaccatggcctcgccctccaccacccggccgtccagcgggatcatgccgccggtgcggatcacgatacggtcgcccggcttcacatcggtgatcttcgtcagcacctcggcgccgtttacctgctgccagacactgtccacccgcaggctcatagcggaggcgaggtcggccacggactttttgtgggtccactcctccagaatttcgcccagatgcagcatgaacatgacggagccggcggtggcaaaatcgccccgtgccatggacaccgtaacggcggtggcatccagcacggcgacggacagcttgccgtgccacagtgccgaaagcccctcccggatgtactttacggagcggagcagtgccagcgacgtggtgatgggcgcaggcaggaacagtttggagatacaccgccgtatgacggcaactgccagcttgtcctcaaactcccggttcagcgcccgggaggtatgctccggcaccagctccatggtctccgccttggcgaaggagaaacgtgccagcgcggagacaacgttctcccgtttcccgccgtacaccaccaccgcgtcctgcgtccggtcgtagaccctgacggagcgcacgccgttctgggcacgcagataatattccagcacatccgcttggggtaatgtcatccgcccgcagcacaggtgtacccgcagtcgtccggtcgtttcgtgtaggatcttgcacttcatggctcactccgccttgctttcctccgcagaagcgtcctccaccacagcggcagcctccgcctccgcgcggcattcgttgatggccttcgcatcggcgtaaacatcctccgcaccctcacgcaccgccgtgaccgttttcatcacgctctccttggcacgcagtgcggcagcagtggtgtgggcgtagaccttcttggcgtccttgctgcccagcagcttgatacccgccgtgccgaacagcacgcctgctgcaaataaaccgatttttttcatgatgattgtcctcctatataaaatatatatatgtcaaaccgatggccgcgatggcggcatcggaatgagtttcgtgttttttcttcccgaaatcctatcccagtgccacatccagcgtcatcatgacgctaaagcccacggcaaagaaaatcgtgccgatgttggagtgctttccctgtgacatctccgggataagctcctccaccaccacatagagcatggcgcctgcagcaaagctcagaaaatacggcagcgccgggatcacgagctgcgccgcaagaatcgtcagcatcgcgccgataggctcgacaacgccggaaagcacaccgccgaaaaacgccttgcccttgctctcaccctccgcccgcagcggcatggagatgatcgctccctccgggaaattctgaatggcaatacccagcgacaggacaagcgcactcgccgccgtgatctgcgcgttccccgcaaggaaacccgcatacatgacacccaccgccattccctccggaatgttatgtagagtcaccgccagcaccatcatggtgctgcggcccagcctgcttttcgggccctccgcctggttgctgcccacgtgaaggtgagggatcagatggtcgagcaggagcaaaaacagtacgccgacccagaagccgataaaggcgggaaggaaagacagcttgcccatgccctctgactgctcgatggctggaatcagcaggctccagatggacgccgccaccatcaccccggcggcaaagcccgcaagggcgcgctgcaccagatcgccaagggatcttttcataaagaacacgcaggccgcgcccagtgttgtgcccaagaagggaatcatgattccaagaaaggtttccatttgcttcaccgcctttgcgttgcagtattatttgttctttctgaatcccgcctcgtcccggtattcgggatgttcttttaagtatgggtctttgtcgccgcagatggtatagtcgcatttgcagccgtccacacaggtagtcgtccttaccagtcttgcgtggagcagctccatggaagcaaagtccacattgcacaaggcgggcatgatgtccgtaagaccgtgccggatggcaaattccgctgccggacacgatgtaaattcataatagatgggcttgccgttttcataaggtgcaaccgtcatctcgtaatcgtgccatttgtcgcagccgcctttcgcccgcacaaacgccctgtacatctgcttcctccagaacggcttgttgcagtccacaaagtgcagcctgcggaagatcggcaggatcagattttcctccatctcctcgatctcgtggaaggatgcgacggctttgcagactgtgtaatagctcatgatggcgatgcagtcgtaggtgccgcctacgccgttgtggaagttccgcttgccgcccaaatcggtgcgccagtcggagaggaagtccgcatactgccgctgtaccttttcccatatcgcctcccgctccgcttccgggtagtgcaggccgatcttcgcccgtatctccttcttgcagggcttggaatacagcacatggcatttgcggtcaaataggagcttcttgtccttcacctgtctgcttctccctcatttccgcgccgtgatgcagagccagcttttctttttgtgtatccgcacctcgtgaaaacccgcctgctccagatacgcctttaactctacgtccttatagatggtcatgccgccgatgatctccgtccacttttcgtccctgtctgtgtcgccgttgctctcgttgcagatgagaaatgtcgcaccgggcttcagcacccggtaaacctcccggaagcactgcggcaggtcaggccagaaatagacggtttcaaaggctgtgaccgcatcgaaccagttgtccgcaagcatcatatccgccacactgccttgcagaacggcgcagcgaccctccgctatggcggcctcgttgacctttttggatttctccacactgacaggcgaatagtcaatgcccttgacgatcccctgcgggcattttttcagcagccgccggatattcgcaccgccgccgcagccgcagtccagcaccctggcgtccagagtaagctccaaaaagtgaagtccccaccgtgccacaggactgtgccccaggttcatcatggcgaccatgattttcccgctaagccccacaggctttctggtgttctcaaaaaatgacatcttatcacacctccgatttcacacattccgcataggtcagcgggaaggacgcctttagaacagcgcttttccgcaccgtccagccattctgccttaggaagcgcaggtattcctcgcccgtccacctgccgtggagggggaagcctgccatcttcatgaaaaatgccctgaccttgccgaaaatagaattctccgcgtgggtgaaggtgggcgcgatgagcacgccgtcatccttcagaacccggcagatctcggtaagggccttctccggctgcggcacaatgtgcagtgcgttggacacgatcaccacgtcgaaggacttgtctgcatagggcaggcggaacatatcctgcaccgaaaagtgcagctttgccgagcggttatcccgctttgcttcaagaatcatctccggggaggcgtccgtcgcctcgatgtgcgccgccgcgttcacgatatgctttgtgatcagccctgtaccagtggcaagctccagcaccgtttttgctttcacgaccggccggatcagcgcatacatctcttcatacgccgcccgatcctttcgcataaagcggtcgtaacgaccggcatttctgtcccaaaaattctttcgttctttcatagccgttgcccttatcacttctttgtttctttgccgccttgtacctctcagaaaggattcaaagtaccgctagattttcccgtgcgggcatctgtcccgccgctgcctggcgtattccagcagggcggcacatgccgggcaaagcgcctcgccccttgtcccatgcacccccccggcaataccggcgcaccatgagggtaacagtttcgatcttcttttccttgttcaagctccgaattcctttctgtcctatatgcagttagccatctctaactttatggtggaagaaaaggcaggccacctgtatgcagtctgccttttatctgatgcgaaagcccgcagccgcgcggggcttacagcaccagcgagggcgcggtgtagacccgtgcctttagctcgctgttgagcatatacagccccttgctgtcaccgccgaacagctccatcttggtgatgaggtcggcggcgttcttctcctcctcgccctgctccttgatgaaccagtccagcatctgcatggcgcggaagtcctttgcctcgtatgcagcggcgtagatggtgtcgatgctggcagtgaccagcttctcatgcgccagtgcctttttcagcggggtcatgtggtcgccccgttcccactccggccttgcgatggcctcaaaggtgacgccctcgccgttgttctgcaaatactgatagaacagcatggcgtgatcccgctcctcctgcgcctgcacccggtaccagttctcaaagccgtctaatcccacggaggcgtagtaattggcaaaatccagatacagataggcggagtagaactccttgttgatctgctcgttgagcagcttagatacgttagcgttcatggtgcttctccttcataataacattgtctttttcctgctcccggcaagcgggacagatataccggatccggaggtcgtaggagaggatctcctgccccagtgcctcccggatccgctcctgcatattcggcagccgaacgtccgtgattttcccgcaccggctgcaaatcaggtgatcatgtcgttccgtccggtcgtaccggtccggcgaacccggctcggtgatgcggagcaaaagcccctcctccgccaaaccgttcaggtgcttatataccgtacccagagcgatgctgggatgctccctcttcatctccaggaacacctgctccgccgtgggatgctgctgcagctccgtgacggcggccaatatctcctctgcgtatttcggcatactgcgcccctccaaaataagaactattcttgttcttgttttccattatacgcatattcgccctgttgtcaacagctatggagggcttccgctgaaaaaattgacgaaaaagcttgacatgccaaactgtatctgctatagttacagtataaactgtgcttttcacaagcacagtttatcgcaggagggataaccatggacagttcctttaatctggccgttcacgcgctggtctgcctgagccacagcggacactccctcagcagcgagacgctggcggagaacatctgcaccaaccccacccgcgttcgccgcgtcatggtggggctgaaaaaggcgggaatggtggagacccgggagggcttggacggcggctaccgcctgacggcagacccggcgatgctgaccctgcggcaggtggcagaggcggtaaacacccgcttcgtggactgtgcgtggcacagcggggacatcgaccgtgactgcgccatctgctccggcatggcgggggtcatggacgcgctgtaccggaacatgaacgaggaatgtgccgcctatctctcgcgcattacgatcacagatattgaaacacgactctttacacagaaataggaggattttacgatgcttaccattacgaccaaccgctttgaaaacgacgttctccgcgcggacaagcccgtgctggtggatttctgggcccagtggtgcccctactgccgccgtattgctccggccttcgacaaggtcggcgagcagtacgcagacaccctcatcgccgggaagatcaactacgacgaggagccgcagctcatccagcgcttcggtattgacaccatccccacgctgctgctctttaagaacggtgaggtgctcggctccattgtcgcccccggctccaaggcggccatagatgcattcatcaaggaaactctttctcagtaaggagacggccatggaaaaaatccacgatataatcatcatcggcggcggccccgccggatacaccgccgccctgtacgccgcccgtgccggactttccacgctggtgctggaaaagctctccgcaggcgggcagatggcgctgacagagctgatcgacaactatcccggctttgaaagcggcatcgacggctttacgctgggcgaaaaaatgcagcagagtgccgagcgcttcggtgcggtgacggagctggcggaggtgtacaaggcaagcctttccgggaagatcaagacgttggagaccagcgagggcgtctttcaggggcgcacggtagttatcgccaccggcgcgtcgccccgtcccttgggcgttcccggcgaggaaacgcttgttggaaagggcgttcactactgcgccgcctgcgacggcgcgccctatcggggcaggaccgtggcggtggtaggcggcggcaactccgccgcagcggacgccctgaccctgtcccgtattgcaaaaaaggtctacctcatccaccgccgggacagcctgcgggcaacgaaggtctatcatgagccgttgatgaacgcgcccaatgtagaattctgctggaacagcaccgtctctgctctgctgcacgagaaccgcctgacagggcttcggctgaaggatgtcaacaccggcgcggagcacgaccttgcctgcgacggtgtgttcatcagcgtgggcagagctccggcaacggagctgtttcaaagcgagctggcgctggacaaggccggctatatcatcgccgacgaatccacccgcacgaacctccccggcgtgtttaccgttggcgacgtgcgcaccaaggcgctgcggcaggtggtcaccgccgtggccgacggcgcggtggccgtccactacgcggaggaatatctagcggagaaccggtaaaggagactgtcttgagaacatacagggataaagaggatctcaaaaacgagatccgtcagagctttgaaaagtacatttctgagtttgatacggtcccggaagccctgaaggataaaaaagtacccggtgtggacaggacaccggcagagaatcttgcgtatcaggtgggatggacaacgctgcttttgagctgggaggctgatgagaagcgcggaatggacgtggaaacaccgtcggagcaattcaagtggaaccagctgggcgacctgtaccaatggttcacggacacctacgcccatttgtccctggcggaattgaagggcaaattaaatgaaaatatcgccgcgatccagaccatgatcgattctatgagcgaggaggagctgttccagccgcacatgagaaggtggacagatgacgccaccaaaacagcggtgtgggaggtgtacaaattcatccatgtcaataccgtcgcgcccttcggaacgtttcggacgaagatcaggacgtggaaaaaggcagcgctgtaaattgcaaggaagtgcagcaaaaagcgcagccgcagatgttctctgcggctgcgcttttatccattctcaaggcttcggcctcacgcagcaccatattgccgtctaaatcagcaacgccgtttcacttttgatgcatcgggcggccggatgaaaccaaactcggtgcctactccgcgcagagctcagccaccagagcatccatctgtgcctcactggtttggttcagtgcgccgcgtagcgatacctccgtttcgcacagtcggagatccttcatgttctccagatcagcgcgcatcagccgtgcggcggcaggggcccaggagccgttttccatcaagccgacccggcggctccggaagcccttggcctgtaaatgctccaaaaacgctctcatgggtggaaacagcccaccgtcataagtggagcacgccaataccagcttcccgcagtaaaatgcgctggtcccggcataggagaggtctgtcaccgtcaaatcgcacaaggtaactcgcacgccttttccctccagcttgcccttgaggatctccgacgcatgggcggtgtttccgtggatggacgcatgagcgatcagtatgctctccggttcctccggcttccactgtgaccacaggtcatacagccgcagatactcctccaacccctctgtgagcatcgggccatggagcgggcagatcgttttgacctccagcgcggagacctttttcagcagagcctgcacctgcgcgccgtatttgccgacgatattgtaataataccgccgcgcctgtggtgcccacggggcgcgggcagtccgctccagtgcgccgaagcggccaaaggcatccgctgaaaacaggatcttttctgtttcctcatacgctgtcattacctccggccagtgtaccatcggcgccagcaaaaagcgcagccggtgcgtacccaaggaaagcgtatctccttcgccaacctccagcatacggtcctctgtcaacgcacctgtgccgaaaaactgcttgatcatggtaaatgttttcgcatttcccacgagcttcatctccgggtacctttgcgccaaatgcatgaggctgccggaatgatccggctccatgtgtgtgaccacaagatagtcggggctgcgcccctccagcacctgcgccacattggaaagccattcctccgccgcccgtgcgtccacgctgtccatcacagcgatcttctcatccaaaatgatataggagttgtagctcacacccataggctggacggggtactggttttcaaagagtgtcaatgtgttgtcgtccgcccctacatagcggatcgcatccgttaccgttcggatggccatcggaaaaacacctcctgattttctgcttggaaccggcattagccggtttttctatctgaatcaaatgctcccaataggggacgaaaacagcgccgctacacccggcacacggccgccgcgcgatgccctgcgggcaggccgtccggcgcatccggggaaagctcccagcgcacccttcccgcccactgggaggcgacggcggagaagtggagcagcacgatgcccagatccagcgcggcgtcgaggttgtcggtgtaggcgtcctcctgctgcaccagatagatgctgtggccacggacaaggaagccgtagggctggcggttgaggtagctgggggacagggaggcggcgtagaaggcctgccagagcatatcgtcatagaagtccatcatttcatcaagcccggacttgttgctccagctttccatgtggaccagctcatgcacgctctttttcggcgcgtagtactgctgttcggcctgcacatcgatctgcgacatgctctgaatgttcatccgcagctttttcgccgtcttttctccgtagccgaaggccacgatggccgccacctccagcggggtggtgagggacagagcctttttgatcttgtcgctgtcggtaaaggtcagccagcaggtgtcgatgtccagctccgtcagcttgaggacaagatcctccatcatgtacccggcgttgacgcccgcgtggatgtgccgggcggacataaggagcagatagtgcggcgcaccgatgaggaactgctggtagcccgcggagctttccagtgccggctgcgcgtccttgtccagcacgatcagctccgtggcgatctccggaacaaggcgggggcaggtcttttcatagtaggtgcgaagctgggcaagcacctcgttcggcacctcctttccgcgaaaggcgcgaacggacttgcggttttggatcatagcactgtaattcatagtagcatctcctttccgaaactcgttttgttacgttctgactcgctgtgcctcttttggaaaaagggcggacaagcgcgggatcgtgcttgtccgccctctctcgcggaatacggtctccccggcagggaggcggcagcctatttctttcttccgctccccgcgccggtcactgcacggactccaaaatcgcgtccgccagcgtttccagctcaacggccttgtcctcccccagcgaggaggcgagactgagccgctcgttgagcaccgtcatgttcttcagctcgtcgttgacgaatttttgcatgaggtcgccggacttcaccgcccatgagccgttttcaatgagggcgaaggtgcggttttgcaggttcagcgccttcatgtccataaggaagtcgtgcatggcggggtagatgcccagattgtaggtcaccgaggccagcacgatgtggctgtacttgaacgcctcggagatcagctgggacacgtgggtggaggacacgtcgtacagtgccacacggctcattcccttgtcgcagagccttgccgcaagtgcctgcgccgcgttctccgtgttgccgtacatggaggcgtagacgatcagcacgcccttttcctccggcgcgtaccggctccatgtgtcgtacttcccgatgaaccagcccagattctcccgccacaccgggccgtggagggggcagatatacttgatctgatccaggatcccaccggcctttttcagcaggagctggatgtgggggccgtacttgcccacgatgttggtgaggtagcggcgggcatcgtccagccagtcccgctcaaagtccacctcgtcggcaaacagcttgccgtccagcgcgccgaaggtgccgaaggcgtcggcggagaacagcacgccgtcggtgaggtcgaaggtcaccatggcctccggccaatgcaccataggtgcgcccacaaaggtgacggtgtgccggccgaaggagaaggtgtccccctccttcacctcgatgcactcgtggtcgtccacgtggaagccgaactgccgcatgagcataaaggctttttcgttggagatgaccttcaccttgggatgccgcagtaaaatctcctcgatgcaggcggcgtgatccggctctaagtggttgatgagcagatagtccagctcccgcccgttcaggacgtggttcaggttctccagcagctggcggcaggcggaccagtccacggtgtcgaacagcaccgttttctcgtccagcagacagtaggcgttgtagctgacgccacggggaatggggaagcagttttcaaacagggcaaggcggtggtcgttggcgcccacccagtagaggtcgctggtcacattacgcacacaatacatatctcataccctcccggctcaagccttcacaaattgatccttgccctccgcgcactccgggcacacccagtcggcgggaagctgctcaaacaacgtacccggcgcgatctcgccgtcctcgtcgcccagctccggcacatattcgtagccgcagccgccgcacacataggtgtcgccgatgggcgtgggcttgggcggcgtgggacgcttcatcttcaccatcggcggtgcgggctgcttctcgccgctatccagcgcggcggtgagcaggggcaaaatctccatcacgtcgcccacgatgccgtagtcgcagttcttgaagatgggtgcgttgccgtttttgttgatagccacgatggtggaggcgtccttaatgcccttgaggtgctgggtagcgccggagatgccgcaggcgatatagaggttgccggtgaacttctgtccggacatacccacatagcggtcaaggggcaggtatttgagagtctccgccacagggcgggaagaaccgatggccgcgccggcggccttggccagaccctctaccagcttcatgttcttcttctcgccgatgcccttaccggcggagaccacacgctccgccttgggaatgggcgtatccatggggatacccacggagaagtcgtggccgtcctttttcagtgccgccaccagatcgttgacctgctgggcggcgtcgccctcccggaagatggtgcgcttgcggataccggtgatgggcgcgggcttcttggccgttgagcggctttcgccgccgctgctcttgcccagcctgccgatgagatgggaggcgatgaccacccgctggatctcgttggtaccctcatagatggtggtgatcttggcgtcgcggtaggcgcgctccacctccatgcccttgaggaagccggtgccgccgtggatctgcatggcgtcgttggtgacctccagcgcgatgtccgaggcgtacatcttcgccatggcggactccatgccgtagggggcgtgctgctccttcagctccgccgcggagtagaccaggaagcgggcgcagcgcagcttggtggccatatccgccagcttgaaggaaacagcctgctgtgccgcgatgggctttccaaactgaacgcgctccttggcgtaggccagcgcgtgctcaaaggccccctgggcgatgcccagtgcctgcgccgcgataccgatgcggccgccgtccagcgtggacatggcgatcttgaagccgtcgccctccttgcccagcaggttctccttgggtaccttcacgtcgttgaagatcaactccgccgtggaggaggaacgaatgcccatcttgtcgtagtggtcgccgaattcaaagcccttccagcccttctccacgatgaaggcggagatgccccgggtaccgatgtccggcgtggtgacggcgaataccacataggtgtccgccttgggcgcgttggtgataaagatcttgccgccgttgagcaggtagtggtcgcccttgtccagtgccgtggtctccgtgccgccggcgtccgaccctgcgttaggctcggtaaggccgaaggcacccaacttctcgcctcttgccagcggtacgagatacttccgcttctgctcctccgtgccgtaggcgaagatgggccacgcgcccagcgacacgtgggcggagaggatcacgcccgcgccgccgtccacacgggccagctcctccacggcgatggcatagctgagaatgtcaagccccgcgccgccgtattccttggggaacggcagccccagccagcccagctgtcccatcttttgaacagcctcatcgggaaactcgttgttctgatccagcaggaaagcaagaggcttgatctcctcctccgcaaaggctcggatcttggcgcgcagctcctcgtgcgcgggtgtggtctgaaacagcatacggtgtacctccttatgtcacgtttgttgggtcacttcttcttttttaattgcttcaccggtcagcagccggtgcaggctcacggcgcggaacgcctcgtcctgctttcgctgcagctccgttagctggcagtggatggcgcatttcccgtgttcactttgccagcggcagttataccccggctccatgcaggcgcacaggacgtcatgctctcccatcacgaccataaggtcgtagagattgacgttacgcaggtcgcaggacagccggcagccgccggacgcgccccggctcacctgcaccagttccccagtggagagctttcgcaggatctgataggcgaactgcatggggatcagctccgtctccgccatctcggcggcggagtgcttctctccgtccagcagtacccgcagcatccgcagtgcatagtctgtttcccttgtgatgagcatattcctgcatccccttttcccttggttgtattttcattctatcaatcttgataatatttgtcaagattgatttcggaagaaatttccctcctttccgctcgtattcggaaaaaatgccccgccttgtgccgcaaaacaccgacaacgtcagcctcggcgtggggctccattatgcacgagcacgaccatgcccgctgaaaatcagagcggcgggacagtttactgtcccgccgcccatggttcaagcttctgttagactgatagattgaaatggatcgagctgcttcggcaattcgttttcttcagctggagccgcctgctcttgcacggcgtccgctgttggctttgcgggtctccgcgccccataccccggcctcaaagcgcttattcattttgcaatgcctgagaaagtgcttcccaaaatgtaagacgactactgacagatatgcttatatcgggcgtatcgtctaccgtgatcgcatagcggttccggctggttagatgcgtaaaggtgcagattttctgttttttgtcaaggcgggccaacagaatgttctcgctcatgttttctgtattccaaagacgaaccgtcaccgtctcatctaagggagcgtcggttctaataatgattctcgttgtgttggtgaaaaagctgtgagcacctatatcttgggcggaacaggagaaatcgccctcagagagatttaccgcgctttccagactgccaagagataccggtgaaccctgccctctcattatcatgatcgccttgcctacaaagaagagagagagcattgcaaacacaaagaatattaccgcaaacaccgcagccgccgctttgcgtttcctgattctttttgaaagggaacgcgcaatttcctcggagcgcatatcggtcgtttcatttgcgatggtgggcaaatcactctgcaaatggcgatacgtttccctgcatttttcgcaggttttcatatgttcggcaaccgcctgctggctatccttagagcagcagccgtccatataaagaggaagcagatcctctacaatactgcaagtgacattattcatatagatgcctccctcttttctactactttgatctttgctctgaaaaaagtgacctttgcccatgattcagacttcccaaaaatatgtgatatttccttgaagctgagttcccctaagacgcgaagcagaaaaacctctttatacggctcagccatgctgtgaactgttttgtatatggaaatcgcctgatccctatccagcaggcggtcaaccaagtctgtctgttctgcggctcggtctatttcttccgtagcggttaccttttctcttcttttacaatccttacgatactcatttttcgcgattgcacagagccaagtttcaattttactctctcccttatatttgtcgaaattgatatacgctcgataaaaggtttctgctgttagttcttcagcactcagaaaatccgcgccaagggaaagcagatatcgaaaaaccagagggctgtatttagaatagatgatctcaaatccgtccacacagttccctcccatctcttcaaatctatatattagattcccagcaagccaaaaagttacaaagatcgaagaatatttctttcaactatttttccgtctgaggttcgccggctccttttttgaaaaaccacagtcagcgaaacgccctttgcgtatacaactgcaattgttcgaccttgagcgtattcgtaagcaaaagcagaagcaaatgcggcccgcgaaagggcgttatagaaaatccgttcatttcacatgccggaagtcctttccggtcttcttctcaagaaatcgtttgaattcctccaccgtcccgccggtgagggtgcgcttgtccagaggctgcgcatagcgttttttcatcagaaagatgatgtagtcctgcgactccgccatggcgtcgatcagttcatagcgaaacgtggaggtggtgacctccgtaacgacggtataggactcctcgccgaacgcaatatgatagtccttcgtgcctgccagcgtgtttttacaggcgatcatgccattgaatcggtcctgaaacagcagaacggacagcagcatcacctctaccagcagggaagtcaccgtactggcatcaagcgtaaaaggctctccgtcgaatgggatcagcagcaatgcgttgatgaaaaagacgctccagccgaaaatggcccaaaggatgctgcgttttcgccgcagcaccttgcgcatcgcgcgggcagctacggtcatagatcgatttgtgatatcactgtgaatttcaaaagtcatgtgtattctccgttgtaagtaattctgcacccgcagggcgttgggggccttgcagctgccgccgggcagcgcggctggcgcttgttcatcgcatcagccgcatctcattctcaaactgctccattgcctcctgtcggctggggacttgtgcaagcgtacaggaaaacggctggccgaacaggggttgggacagtgtctccgcccaatgcgtcagcacctccggagtgagggggcgctcctcccggagaaagatcaccccgtaatagggcggtacagacggggaaagcaactgtgtcagcgggacgccgctccggacggaggcgttgcagaaatgcatctccggtgaaaaaagcggatagtacagcgccccgacgaaccagtcctgttcaccgcttctaagccgccttgcctgctccagaaagtgcggatgatccgggttatccggctccacaaactcaccgtcccgaatggtctggtgaagtgcggagaggttatggaaatcaaagtggaaaaagggcgcctctcccgcctcgtcctcggaaagagaaaactcagccgcgtcgaaagggtcccagtccttgccgcagcggtagtacccccaccagtagttccagtcataaatatgcagatatttttttgttttgcagtccatagatgtactccattctgacaatgtgggcacaagaggaaatcacgggaaactctccgcccggcaccagcaaagattctttccaggcccgtcctttttgcaagagggacgctcgaaggcggcgcggtgatcttcttatctgctcaccggaaaggatatctcgaaaacggcgccggtgtccccgttgtaggcgcggatcgtacctttatgcaggtgaatgatctccttcgtcaaggcaaggccgatgccggatttgccgcttttccccatgtagaagcgctcaaagatgtggggcaggtctccctcggcaatgccatccccatcgtcctgtatccggattatcacattccgtttgtcgggccggcaggtcaggcgcagctcgctgcgggcataccgcaatccgttggtcaggatattcgtgaccgccctgcggatctgcgtgtcatcgcatttgaccatgacgggttcttcagggaagtccggcgcgatggtaatgccgctggcagcggctgccggttccacggcgcgtatgctgtcgtagagcagctcccgaatatccgtttcggaaagggcaagctgctgccgccccatatcgattttcgagatgtccaagagttcctccaccagctccgtcatgcggtcgctttcctccaggatcacctccgccgcgctggccgtgtccatcacgcccgcctgtatgccctccgcatagccctgtatcgccataagcggcgttttcagctcgtgggaggcattctggaagaaggtctgctgccgctccgcctccttctcaatatcacggccaaaccggaaccccagcaggcacatgacggaggaaattgccagcagcaccccaaagaacgcccagttcagcgtcacgatatagcgggtgatgggcccgatatctatgtacatgatataggaatacggtttttccgaattaccgtagtcctcctgcacaggcatgaagatcaggtggtgcttgtctgccttgaagtcgtggcatcgattgggcgcaacagaccgttcactgcaatacgccagcagctttttctccagccgataggtgtcctggctccatgtgttgggctggtagccgttctccagctcaagaaacacaatgctgggcgtgaagaaatgctcctccgccccgtcgtcccaatcgtcatcatacacctcgccctcataggtgtaaggaatggtgcgattctcatactgcgcctcgttgcgcagcgccttttccgcctcgcttacaaagtgggcggggatcactacgttcaccgccagcatgaaaagggcaaagagcagcagtgccgcaccgaggatcagatacacgatccgcagcttgatgtttttcatgtgcgctccgcctccttcagcttatacccaaagccccatatggtgcttacgctgacagtgctgcccgcttgcagcagcttttttcggatgcggcgcagggtttcatcggtcacgcgggtctccacctccgagtcgaagccccatactgcattaagtaactcctcgcgggaataggctttctccggctgcttcagcatatagctaagcagccgcagctcggtttgggtcagcgcaacaggtgtattcccgcaaaggacggcattttccgtggcggaatagcggagatctccatagcgcaattcatctactgccgccgctgttttccccctgtccatctccacccggcgcagcagggctctcaccttcatgagcagtatggtgggacggaagggcttggtgagataatcgtcgctgccttggctgatgcccatgacgtagtccagctcgctgtccttggccgtaagcaggatgatgggaatatcggaaacagaccgtagctcccggcaaacggcaaggccgtccgtgccgggcatcataatgtccagtatgaccagctccgcaggctcctgacggaatgcctccagcagcgcgtcgccgttttcaaaggagcgcacggtatatccgtcacttgccaaaaagctatggagcagttcccgaatgctcttttcatcgtccgccaaatagatggaatgtcccatggtgacctccttgaaagcagcgccaaatgctgcgcacaggcgcagcatcggcgtcgtatttagttcatcatatcagaaaaactctttgccgtcaaaaggggcagatgccgctttcgcagccggtattgccccaaatggtgtcgtacagcttgcacagctggttatcaagctctaccagacggttgtagtcggcgatcagcgcgtccttttccgcgtcggtcaggaagctcaggctgcggatgaaggcggcctcatcgtagttgtcgaagtcgtagtcgtctggcaggttgaagtacgcctcgtccaccttgtcccacagatcggcgttcttctcgcagaggcggtcatactcctgctccagggtgtcgatctcatccagtaccttggggtcggccttttccagtgccttctcgtaaagcggcatattgtcgcactcgggcagctgtccatacagcttctccatctgggcatccagctcgttcagctccttgatgtcattcagaagggtctccttctccgcctccgtcagcgtagtcatgccgcggatgaacgccgcctcgtcaaagttctcgaaatcgtagtcatcaggcagggcattgcaggcctcgtccaccttgtcccacagtgcttcatttctctggaatacggcatcgcttttttcctccagtgcctcgatctgatcccaaatggcatcctcgttttcggtagctatgagggtctgcggctctgcctgattgggcgcagcggcaaatgccgcagtcgatgctccgatggctgtaaccgtcattgccagtgccagtaaaaggctccaaactgttttctttttcatggtatgttacgctccttttttgaagtatttgtggttgtgtatcaaccttgtctgtatcatatcagaagaagtctctgacttcccccgcaaaagtgcgggggaagtgtcacaaaactgtcacaaagtcggtatgccggcacttttcaaggtagccttgacatagaaccgccttgacatccatagctgtgattgataagatagacgcacctttctgacgggagagccgtcggaatgaaccgcaaatgacccactcatcgcggcggcgcacaggccgtccggcatgcgaaggagccttatgaacgggacgcacaagcagatttttatcgtcatcacacaaacgggtacgatgctgtcccgtattctgaagcgtatcaccggcgcggagtacaaccacgcctccctcagcctgtcccaggacctgacgaggatgtattccttcgggcgcaggcatccctataaccccttttggggtggcttcgtcatcgaatccccccacgcggggacgttccgccgcttctccgataccaccgccatcatccttgcggtggagatcaccgaggagcggtacgcggcgctggaggcgacgctggaggccatgtgggcgcggcgggagcagttttcctataatttgggcggcctgctcctggcgtatttccacatcctctggaagcggtcgaactgctactactgctcggaatttgtggaggatatgctgctgcacgcagaggtgcgcggcgcgtgtgagctgcgcacccgtgtcgtccaacccatccacttcctgaagctgccccacacccggctgtacaccggacggctgcgggactatccgcattgcacggcgccaaggtaagggggctttcaccgtgtctgatgcgatctacaaatagaagagatcttcgctgcgaatggacatttcagcgcatacaccggttgcggaagcgaaaaagtgccaacgccctttgcgctgcgaacactgtttgcaggcaagaagtgtctgtcttatcatttgcctgagacaacgctcgcatatattcaacatggactataccggagccagaccatgaaacaaaagacgcagggacgagagctatcaacactcgtccctgcatcttttgtctttagtgactatgatgaatatgcggccgtttcctatagttttgccttgcgtatcttggggcaatacataccgagcacaatgaattcgcagccgcatccgttttaatgccggtttgagggcattgcgctcatgccgtgttgtcagctatttgctgctggcagtgatacatatacctcatacgggtactgtgaaaccataacgcccgacagcggctatcagatggcagaaggctctctgacctactcgctggctgtggcaggtggtgaaacggtgaagatcaccggtaaccgctttactatgcctgcaggcaatgtgaccatcacctgcaagtgggagacggccacaacgactgtcaagggcatcaccagcttctccatcaacggtgtggccggcgcggtgaacaacagcaccaatactattaccatcaccatgccccgcggcacagatgtgacgaagctgaccccggttatcgccaccaacggcgtcaagtccctaacgcccggtaacggtgaaacggtggacttcaccaatgccgtgacctacaccgccgccatggaggatggcagcagcaagacctatactgtcacggtctacgtggacaaggggacgctggccgatcagttctgggataagctgacggatttcgccacccaagttccctggtggcaatatgccgaaaaacagcagagcaccagcaagtatcccaagtattggtaagtagttttctctacgcaagggaggctgccggcgttgccggcagcctccttcttattttccatccttcgctgctacgaaccagcggcctttttcaaaccagagataactctccctgccccgtatgcggcaggtatatctcttttggcaggctgcgcggcgcacgtccagtatcttgtcgatatgatatctgcgcatttcgtcaaactcgatctcgataggacgcatcttcccgttggcgtcaaaatgcactgtcaccggcacatacttcttttcaagttccatggatattccccccatcgttgccatgctggtgctgattctcgccacttggaccaccaataccggcaacgcctatatgtccggtctggccgcctgcaagatgttctccatcaaggacagcaagcgtcctctggtcaccatgatatgcggcgtactgggcgtcattatggcgattgcaggtctggcggatttcctgaacacctatatcagcattctgggcgcggtggtgcctcccatcatgggcgtcgttatctgcgactactgggtcatctgcaaggccaagaaggagaactggtctcccgtgcgcggcatcaactggatcggcatcatcgcgtgggtcatcggcggcggcttcgcgctgctggagacgctgggcgtggtgacggtgttctcctccgcactggacggcgtgatcatcgccttcgtggcctactggatcctctattccctgctgaagaataccaagctggccggctccggcgatatgactatcgaagaagccggctctgtcgcacagtaaggagtgtttgctatgagtaaagacaaagcgttagatattgtattgtccgaatttctggagctggcaaaggttccccgcccctcccatcacgaggagcgtgtcagcgagtacctgttccagtgggccaaaagccatggcatggccgtggaaaaggacaacatgaatgagatcatcattgacaagcccgcctcccccggctgcgagaatgtaccccgtgtgatctttcaggcacacatggatatggtctgcgtatgcgaagagggcgtcacctacgatcctatgaacgaccctatcaaggtcatcaacgatggtgtgaccctgaccgcagacggcaccagcctgggtgccgatgacggtatcggcgtggcgatgtgcctgtacctgctgcaggacgacaccctgcgtcacggccccatccgcgccatcttcaccaccaacgaggaagacggcatgggctccatcgccattgaccccaagtatcttgacggcggctatctggtcaatttggattgggaaacgctgggctcactgtgcaattcctgtgccggcggcgacttcttcaactacagccacaaggccgagtgggaaaagcctattgtgggctgcaagacactgaccatttccctcagtggtctgctgggcggtcactccggcgtggggatcaacaagggtcacgccaacgcgctggtcagcatcgctacgttgctggctatgctgcgacagggcggcgtcagctaccgcgtggcctccttcagcggcggtcaggcgaagaacgccatccccgcatttggcaccgccaccattgttctgtctgccaccgaggaggacagggccaaggctatcattgaaaccttccgcgcagagttcgtggaggcttttggcaacatcgaatcggatatggtgttcaccaccaccttcggtgataccgcgcccgaccgcgtactgacaggggaggttggttatggtatggtagggctgatgaccacggttcccaataacgtacataccatgagtccgttcattgacgggctggtagaaagttccgccaacttgggtgtggtgtccgtggacgaggatatggtgcgcttcacggtgtttgcccggagcagcgttgcctatcaggccactcagatcggtgtgatctgcagcgcactggccaatagcttcggtttcaccttcgacagcgagggtcatgttcccggctgggcggtcaatcccaacagcaagctgacccatatcgcttgcgaggcctacaagcatctgaccggcacggatatgatcgtggagccggtacacgccggcgtggagtgcggcgcctttgcggagaagaatccccacctggacatgatctccgttggtccgacgcttcttgacgtgcatacgcccaatgaaacctgcaagatcgaggacgtcaagatcaccaccgagctgctgatcgaaatcctggagcgtatcgccaaataaaaaggcttcatcttacttccaatttaggctactttcgaccattgtctccttacaggtcaggagccggactgcgtgatacgcgcagtccggctcctgacaatttatgtatgccgaagtatgctctatatgaccacctgttgatttcacggcttctgtatcgcggccaatgagtccatgagcgaatggaagccatcttctcccagcatggccgcggcatcgaacgggatgtcttcagaggtcataatagccggatcgccgccgggcatatcctcgcccactgcgggtacgcactttctcaaaaggcccttatcgtgggttaacctattctgcgctgcttggaatcggaattctgagacgtgtccggcacagtctcggactcctgacgggaaaaccagtcgcttttcttcccgataatttccccggatactgcatcgaccttgtaggaatacgcacacttgtccgtgtagaactcaaggatatagcagggtttgccagaattgcggctcagctcctccctggtgaacacgattttttgcgctgtctcatccagccccgcgtcctctaatgcgatctgctttgccttttccaagccgataaactccggggcagggggaatgatcttatcgcaggtcttatccatgatcacacccaaaaccgcgtcgattttgtaggtccagcgagcagaggcactttcaaaggcgaagtaatagtagggcgacttgatgccgccggcaaccagcgtttcctcggtaaaggtgaccttttcgctgaccccggcgtcgtccagtgcgattttcttcgcgtccgccagaagaatgaagtggtaagtctccatgatgctgccgttcttagcgtctaccttgtaggaatactgcttcttcgcggtgtagaactcaaggatatagcagggcttgcccgaattgcggctcagctcctctcgggtgaacacgattttctgcgctgcctcatccagccctgcgcccctcagggcgatctgctttgccttttccaagccgataaactccggagcaaggggaatgatcttatcgcaggtcttatccatgatcacgcccagaacggcgtcaattttgtaagtccagcgagctgagtcactttcaaagacgaagtaatagtagggtgacttgatgccaccggcaaccagctcctctgtcgtgaagaccaccttcacattgaccccggcgtcgtccagtgcgattttcttcgcgtcggcaagggtgatgaaccttccggcgtagatgatgctaccggtctttgcatcgatctggtaatgatactggttcgttccggtatagaactccaggaggtagcagggtttgccctgattgcggttcagctcctctctggtgaacacgatcttctgcgtcagctcatcaagcttcgcgtccctcagtgcaatctttttcgcttcctccaaggagatgaacttcgatacgcagatagaagaaatgccggagacctcttggaatttaagaagctcgtccaacgacatgcgggcaacctcgtccgtgggcagcccggttttgtttgctgcggtgaggatccagtcggcgcggccaagggaaacatggaattcctcggcgatcttcgccacttcggcgttttccgtcagttcggagtggaaaaccagcgtgccgacggcatcggtctgctccagggcctgctggatctccgcggagagcgatgcctttagctcggcgttcgcatcaagacgggaatcaaaagagatcagaaccgtcgcttcgccgttttccatgtatccgcaggcctcgtaggcggcgaccgtgcgcgttagagcggtctcgacactctgctttcccagcgcaacatcgctgagcgcattttccgcatcgctgttcagactgcggatgctcttgacggcgccgctcttggcaatcgtatattccacgctggggttgacatccattgtgaaggtgcctgctgtcgcattgcttcggatggcatgtgtggcgatgccggtacagagaaccagtgcaaggcaggcagccattgttccaagcttggcccaaccgggctttcttttggtatttgcttcgctttccgcgtcagcgataagctcgtcattgatctttccgatcgaacgaagaagaacttcggttttcatagcataattccctccttttcaagaaatcgtcttagttcgtttctcatacggaaaagcaaagacgtcaccttgctctcgctcattccgtatgcgtccgcaatatcccgtattgcatagagatgatagtatctgcggacaaaaatgttacggttcagcttgggctttgcatacaggaagcggtcaatggcggcagccaactcattttcttcgatggtctgctccacagtcgtttccgaaggaacgcaggcttccaactcagacagtgcgaggactacttgtccgtgtccgcgtttttcggcagtataccgcttataacggttcagagcgaggttgcgcgtgattttccctaagtagatcgacaaacggctcggacgctgcggcgggatcgaattccatgcgccgagatatgtgtcgttggcacattcctccgcatcctctttgttacgcagtatgttatatgcaatcgtgtggcagtagctcccgtacttttctgcggtggcggcaatcgcgctctcgttacgcgcccagtacaattctatgatctcatggtctctcattgcgccctcctttctttctgcgtaaaggcctttcacctatatagacaacaaaaatcgccgttcattgcgtggacaggaaaacttttcttcaagcttatcatatcatgcgggagcggcgatttctaccggtctgaaagtgctggcttatcatggtacagaggattctcggtcactttgggttcttgtgcagtctttttcatcgttcgacctccttattgccgcgcatcttcgtcgggtgcaatctgagttcaaagtgatagacttcctgtgcgtcaccgcaggtgaccaccaactgaagccaccggcgcagaggaggccccccttctatcgtaacctcgcagtcgtcggataatggtaataacatatatttggatttagcgcatgaagcgcacggcagtccttgtgccacaaggatttctcgcatctttcgctcgattcgatggcggttcatttctgaaacgctaccggcctcatttgaatcgatgggtgccgctatggtcagggcagtttcctcctgaagctccagcttgatgccaaggctcatggcgatctcttccttgtccaccacgatgtcagaaatttggaacatggtggagagatagttctggagatagatcgtagtgccatgtgtgccggggaaggctgccagttgcagatagccccgttcagccatgcgcttgaggtgtcggccggcagttgccttagagacgccccagcgggaagccagctccgcatagctgaccagcgggcagcctgtaccgttgcggagatagaccaccggcccgacgtctgaaccgaggacttgcggatcgttatagaccgtgttcagccatagatccaatacggcgtccatctccgagcagtgaccggcactgaccagttctgtggccgtagagacagggaagaagaaaaagccggtatccttctgacagggcgcattgtagtcgagaatcgtgttgtgacgccgccacccgcgaatcttgaatttgaccagcttaccatgtccgagaacaagaaaactgataagccctttcttttacagtccctccaaagcggccaaggtctggcggcggaagcgagtgcggaaataccgggacaattcctccacagacatgatccattcgccggggtagatggtgtaactaatgccatcaatgcgtttgtatgaggtgcggaagttggcataggcgcatagcacgacaaaacaaataaatatcccccggcctagccgggggatatttattcgtacagataaaaagagcaccctatgggtgctcttttggctttcgcttaaaattccgcgttgcccaccgtgcggggatgcagctccacgtcgcggatgttgctgacgcccgtcaggtacatcaccatgcgctcgaagcccaggccgaagcccgcgtggcggcaggaaccgtagcgacgcaggtcgcagtaccaccagtaatcctccgggttcatgcccagctcacggatgcggctctccagcagctccaggcgctcctcgcgctggctgccgccgatgatctcgccgatgccgggcaccaggcagtctgccgcggccacggtctttccgtcatcgttcaaccgcatatagaacgccttgatctccttgggatagtcagtgacgaacacgggcttcttgaatacctgctcggtgagataccgctcgtgctcggtctgaaggtcggtgccccactccaccttgtagtcgaacttgtcgttattcttcttcaggatctccaccgcgtcggtgtagctgacccggccaaagtcgctggacgccacgtgctccaaacgctccttcagccccttgtccacgaagctgttgaagaagtcgatctcctgggggcagcgctccagcacccggcggatgatgtgcttgatcatggcctcggccacatccatgtcaccggccaggtcgcagaaggccatctccggctcgatcatccagaactcggcggcatggcgctgggtgttggagttctccgcacggaaggtggggccgaaggtatacacatcgccgaaggccatggcgaaattctccgcattcaactggccggacaccgtcaggctggttttcttaccgaagaagtcctgggagtagtccacctgcccgtcctcggtcttggggacgttgttcagatccagggtggtcacctggaacatctcgccggcaccctcgcagtcgctgccggtaatgatgggggtctgtacatacacaaaaccccggctctggaaaaactcatgcaccgcgtaggccgccgcggagcggacgcggaacgtggcggagaacaggttggtacggggccgcaggtgctggatggtccgcaggaattccacgctgtggcgcttcttctgcagggggtaatccggcgtggactttccctctacctcgatgctgtgggctttcacctccaggggctgcttggcatccggcgtcagcaccacggtgcccttgacgatcagcgccgcgcccacgttctgtgcggcgatatccttatagttggccagctcctcggcggacatgaccacctgcaggttcttgaagcaggagccgtcgttcagctcgatgaagccaaaggtcttcatgtcgcggatggtgcgtgcccagccgcacacggtcacgtccttgccgcccagggactcctgatcggcgaagatcgcggcaattctcattcgttccatatcattctcaccttttctatgttcttctgcgttgcattcggcagccgttttgacagtacattatattataaaccaacgcgccgggatttacaaggccgacttttgacctgcagacgccgttcataaaaaggaaagacaccccgaaaggcgtcccttccttttatacactttcacatttcctgggcctgtaattggaggcgatcggcgatcatggcgatgaattcggagtttgtgggcttgcccttcgcggagttcaccgtatagccaaagtatttctgcagcgtttccaggtcgccgcggtcccacgctacctcgatcgcgtggcgaatggcgcgctccacccggctgggcgtcgtcccgaaccgctttgcgatctccggatacagcaccttcgtcaccgcgttgatgacctccatgttccgcaccgtcaggataatgccttcccgcaggtactggtagcccttgatgtgcgccggcacgccgatctcgtggatgatggccgtgaccatcatctccagttgctgcagcggcaggtcgcagcgcgggcctgccgcgtggcggatatgctccagcactgaggtgtcgtccgccggcttgggcaggaatacataggcgccggcatcccggatgtcccgggccgcctcggcggtgcggaattccgtcaccacaatgcaccgcgtctcggacttgcccttcagccgccgcaggatacctgtgccgtccagtccgggcagtaccgtgtccagcaccagcacggcggggtgctgtgcctccaccatcgccagcgcctcacggccgtcggcggtgtcgccgatcagacagatatccccctgcttcttcaagaaatcgcacagctctgtccgatacgcctggtccgcatccgcaacgcatacagtgatcttgttctccatattcactttcccctttaacataattttaacggcacgcaattccccatatacacaccacgaaccgctttgacgctatcaaaaataccacaaacagacagcaaatgcaagggcaatttgtcgaaaaccaacattttcgttcgacacccagcgaccgcattcgacaaaaagccgtgctcacgagatgaaatgttccgttttaccgatattccgcctctataattgcgcatatatcggcaattgtggccgctaatcggcatttcatgtgcaatgtatcgagttgccgtttctccacaggtctacggctgccccaaggagatgcagggggtgccggtcagaccggcgcaaaaggcaaaacaactccgcgcggaaatggttgtgttggcgggaaaatcggcgtataataaattgaaaacgatcacaaaacggaggctcacctatgaaactgatggttctcgacggcaacagtatcgtcaaccgcgcctattacggcgtcggaaaggcgcgcctgctgaccacacggcaggggctgcacacaaacgccatttacggctttgtcaccatgctgcagaagctgctggaccaggagaagccggacgccgtgtgcgctgcctttgaccggcgggagccaacattccggcacaaggccgacgcggcctataaggccaaccgcaagggtatgcccgaggagctggccgaacagatgctgccgctgaagcaggtgctcgacgccatgtccgtgccctgctatgagctgtccggctacgaggccgatgacctgatcggcacgatcagccgcaagtgcgaggccgccggatgggactgcaccatcgccaccggcgaccgcgacagcttgcagctgatcaccgcccacacccatgtgcgtctgctgaccggcggcaagggactggacagcgaccgctgcatgaccgaatccactttccgggcggagtatggctttgaccccatccacatgatcgacctgaaggccctggccggcgacagcagcgacaatatccccggcgtgcccggcattggtgaaaagaccgccatggcgctggtacagcaatatggctccattgacgccgtgtacgcgaacatcgacagcgtgcccctgaagcccggatttttatgtaaactcaaggaaggcgaggcctctgcccgccacagctactggctggccaccatcgacacaaatgcgccgcttgacttcgacccggaggctaacctgcgccagcccttcaagccggagctgtatgacctgtttttgaagctggaattccagaagctcatcgataaataccagctctccccggcctgcgtggcagaggagctgcccacatataccgcggaggcggaaatactggagacggccgagcgtgccgaggcgtgcctggccctgtggcgcgaggcggcatacgtgaccgtatacggtacaccggatctggcggcgctggcggtggaatgcgagaccggggcagacagctctctgatggttgaaatttatgtcaaccgatatgccggtgattggcgggcgctgctgtccgccctgtttgcgccggatatccggaaggttggccacaatgtcaaggacatgatgcgttccctgctggcccagggactgcccgccgatggtttcatcttcgacacggtgctggccgcctatctggtagacgccaccgccggcagctacgatctgcagcggctgtttgtcacctactataacgagcagctgccccagcccgaccatctgacggcggatgccttcaatcccctggttggggagaacatcgccgcccagacggcgcttatcagctacaccgccgccgtgtccgccctgcacgggacgctcgcgcccaagctgcgggagctggagatggaggaattgtattataatgtggagctgcctctgtgccgggtgctggcggatatggaaacagctggtttcctggtggaccgggacgccctggcggatttcggcgcagctctgcagaagaccacggaccgcgtggagcaggctatctacgatgccgccggagagactttcaatatcaactcccccaagcagctggggtatatcctgttcgagaaattgcagctgccccacggcaaaaagacgaagaccggctggtccaccaacgccgatgtgctggaaaagctgcgttacgcctatcccatcgtggacgacgtactgtgcttccgccagtatacaaagctgaagagtacctatgtggacgggctgatgaaggtcatcgatatggacggccggatacgcaccagcttccaaatgaccgtcaccgccaccgggcggctcagctccacggagccgaatttgcagaatatccccacccgcaccgagctgggcagccagctgcggcggatgttcacggcggcggagggctgtgtgctggtggatgcggactactcccagatcgagttgcgcctgctggcgcatatgtccggcgataaggtcatgcaggcgtcattcctgtccggtgcggacttccacactgccaccgcctccaaggtcttccacgtgccggaggaggatgtgacgccggagctgcgccgccgggccaaggcggtgaatttcggcattgtgtacggcatctccgcctttgcactggcccaggacatcggcgtcaccgtggcggaggccaaggcatacatggaccgctatttcgagacgtacagtaccctgcggcagtatatgaccgacgtagtggcgcaggcggagcaggacggctacgtacagaccatgatgcaccgccgccgccccctgccggagctgaagagcagcaatttcaacctgcgggaattcggcaagcgggtggcgctgaatatgccggtgcagggcagcgccgccgatatcatgaagctggcgatggtgcgtgtgcatgaccggctgaagcgggagggcctgcgtgcccggctgctgatgcaggtccacgacgagctgatcgccgagtgcccggcggaggagcaggcgcaggtgaagcatatcctcacggaggagatggaacacgccgccgtgctgtccgttcccctgacggtggacgcccactgcggaaaaaactggctggaggcgaagggataaagctatgaaacacatcaagatcgtacccatggcggcggagcatttgaacgacgtggcggcgctggagctggcctgcttctcccgcccctggtcccggcagatgttggccgaggagctggacaaccagtgcgcggcctttttggtggcgttggagccggagacggagaaagttatcggctacgcgggattgctggtagccgccgacgagggctatatcaccaatgtagcggtggacccctcccgtcgccggcagggcgtggcggcccagctcttgcaggtattcgacaactttgcccgcggcaatcagttggcgttcctgacgctggaggtgcggccctccaacaccgcggctatcgcgctgtatcagggcttcggcttccgcgaggtgggccgccgccgcaactattacgacctacccaaggaggatgccctgatcctgacgaaatactacacggaggaggcggcgcaatgaacatattagctttcgagtcctcctgcgacgagacagcggtggccgtggtccgggacgggcgggcgctgctgtccgacgccatattgtcccaggcggatatgcacgccctctatggcggcgtggtgccggagatcgcctcccgcaagcacgtacaggccatcgctgccctgacggacaaggcgttggccgacgccggactggccaaaaaggacatcgatgccgtggccgtcacctacgcaccggggctcatcggcgcggtgctggtgggcgtcagctttgccaaatccgccgcctacgcgctgggtgtgcccctgatcccggtgcaccatgtgcggggacacatcgccgccaactatctggcctttccggagctggagccgcccttcgtggcgctggccatctccggcggcaatacgctgatcgtggatgtggcggactacaccgatatgaccgtgctgggtgccacccgtgacgatgccgctggcgaatgcttcgacaaggcggcgcgggtgctggggctcccctaccccggcggcaggcctatggaccagctggcgcagcagtccgcaggcggcgtgtacgacctgcccagcgcccatgtggccggggcagagttggacatgagtttttccggcctgaagaccgctgtggtgaacctggcgcacaacgcccagcagaagggcgatccgctggacgccccggcacttgcccgggactttgcccgcgccgtgtccggggaactggtgccccgcgccatgcgcgccctggagcttaccggccgcaggaccctggtggccgccggcggcgtggccgccaactccgttatccgcgccgacctgcaggccgcctgtcgggaggcgggcgtacaactctatctgccgccgctgaagtggtgcggcgacaacggcgccatgatcggtgcccaaggctactacgagtatcaggcgggccgcaccgccgggctcgacctcaacgcctacgccaccatggacctgggcgcacccctactgtgaccaagcacccccgttttcgggggtgctttttgtcaaccaaccgtcgtcggcggtgttatggaaatcatcacgcctatatccttcgttcttctccatgatatgacattatgttaagttaacggcgtgtgtttcgtgggtgaaagaggtgtttttcggtacttacattttcttccataacaagaaaattcagcgtatttaaaaggattttcgcagtgtggaaaaagtggtggaaactgtggataactcattgtaaaaattatgtcatgtagaattatgtcaaattaacgtaaaggccttcgggttgctgccggcgtgctgttttgtgtgaaaagtataccggaacgggaaaatatgcgggggatttcccgtaagtgcccgccgccgcgcagcgcaccgccagcggcgttttccttacttttccggaagatctgcggccgttgtcagcaatcgattacattatgtattgccattcccggtacgtacccacttcggaagtaggcggagcagaaaaaggctctcttcaccggaaaagcggttgacggcgccggcaaaatgtgctatactaccatctgcgttgatgcttgtgtggctcagctggcagagcagctcactcgtaatgagcaggtcgccggttcgaatccggccacaagctccaaaacccttggaatcgcaatgatttcaagggttttttcttgttttcatcaaaattttagacctcctgcgttccccacctaaactcagggacgcaggaggtctaacgatgaaccgcaaaataaaacgcataccgcaaacaacgctgtccatgaaaagggcatttgacgaatttgtggtcgctcagaccgcaaaaggtcttaccgaaccgaccatcaaaaactaccatgcacatttccactccatcagcaggcacattgatatagagaagtcgttttccgacctgacgcaaaccgacattgacggtatgatcgtttcaatgagaaaaagcgggttggcaacaaattggaccgtgttgcatcgatctacttgcacagcttgtccctcggtatcacggtgcggctgccgatcttcagcacagggtggcctttggtgtattgcacacagttccagttatgctccaaggctaatgtgataaaagacaaggcgttggctttcgcatgtcattccagtcttcgtgtgtccttcaggtcacctatgagtccttccgcttcctctgcaagatccgccagagtgtagtccggctgattcccagtttttcagcgacttttgtttgattctgcttgctctgcgcaagctgtcggcagaccacgtcgtaaataatatcatccagcggctggtcgatattgatgctctctgctggagatgcagaaaatgttcctgcgccctcctgccgcagcagattccgcaccatatccgccgttatatacggtcctgcagtctgcaggataagttcttttacgatgcgcctgaactgattcagattccctggccaggagtaacccatcagtacatccaacgcttccggcaaaaaaccgataacctgcttagtcagctgtgtattgaattcgctggtatacagggtcgctaatgccgggatctcgtgaatgcggtcccgcagcggaggaaggcacagatagacgaactcctcctgggtggcatatcggcagataggaatatcatccgctgtttttccgtccgttacgacagaaaaaagatatttatttccggaattcgtgcgtatatgccgcaggagtgcgctgcattggctttcgctcaaacactcggcgttctggaagaagatggtcatccgctgggaaaacaggacagaatttggctggttggtgaaggactgccagaattttggtgtggccctggcgcagtttaccacataaagcggccattccttatagggactgttgctgtatagagcgttggcgactttgtttttcgacgtaccactctctccgataatgaggatggggatgttgacaagagcgtattgctcaatttcgctgcgcagaaaggagtttgcatagttggtaaagtagtgtggggaaatatcattcgcggtatagacggtaaggatctgcgattcgccgccatctgtttgcagcggctgcgccgtaaacagatagtatttttcattgtggatatagctgtattcgtaggagatcgcatactgttcgcctcctatttttcgggagaagtctcgattttccaaggcagataccgttgtgatgaagtttttgaaaaactgccgcagcttatgcttttcttttaaagcagcgttttcccagcaagaattgcctttgctgtcgagaatcgcatagtatgtatttccgccctgcgtgatttttcggagcagtccctctttggcaccctgcacagacaacagctcatagatgtaaagtgcctcattcagcgtagactccaggctttcgatgcccgaggtgatcagcacagcatccagcgagcagcgctgggcgtatgcggtggtaactgcatcgccgatgatcaatgaaaagccctgcgcattcaaggactgtatcaaaccgtgcaggtgctgtgcggagtctaacgtatacaccggaatgtcagattgcaacacgccgcaaatcagccgcgccatcttgctgatgctgggatacgcaacaatggcagacttgcccggataattttccaccaggcggatcgtactgagcacatcatagctggacagagaaatatcaatgaccggaatacttgtcacagtgcggatgatctcggctgtgccacctcgtgagatgataatatcgtaatcctccgaagggatcgtctgcaccagcttggcgccctcctccaagtcaccgaccaaagctgtcagctgaatctcggggcggtctgcacacagattgacaatcagattccgcatactttcatagggagcgatggcaagtattcgacacataggcgcctccaattgttctgttttgaaacatcaaaagtttggctttgcagattatttacatttcgtttcacatataaacgcgcggtaggggaaatcgccttgtaaaacgcaacaatacatgcaatcattattataacttcggaacaacgaatgtcaaattaaaagtaggagcatcgttatgtcaaaagcaatatgcagcgtaaagacccctggatgcacatatctgggcataaatgccacagaaaaaatcagtggtattttagaaaaagaaaatgccaaaaaagtcattgttttgacagaccgcggcgtttatgatacaggcttatgcacccgcgtactggagcagttgaacggtgctgcgtatcacctgtacacggatattaagcgggagcccagctatctggatgttgaggacgtagtccagaccattgaagacctgcaatgtgacatgatcgtcgccgtcggcggtggcagcgtaatggacacagcaaagctctgctccgtattgaaaaatgctccgtattccataaaggaccttctgcgtgatcccgcgttggcccataagcagatcaaaacagtgtttctgccgaccacctgcgggaccggctcggaggccacctgcaacgcgatcgttgccattccagaggaaagcgtaaaaaaaggaatcgtcaatgacgaaatgatccctgattatgctattctggaccctgaaatgatccgccatctgccgcctgctatcgtagctgctacaggagtggatgcgctggcccatgctgtggagtgctacacatctttgaaggccactcctctcagtgacctctatgcaagggaaggcgcgcgcctgattttccacaacatcgtgaaagcttaccgcgatccggaggacatggatgccaagaaagccatgctgctggcagcctattatggcgggatcgccattaccgccagcgggacaacggccgttcacgcgttgtcctatccgctgggcggaaagtttcatattgcccacggcatttccaatgccattctgtttagccctgtcatgaaggtgaaccgcagtgcctgtgcacaggaaatggcacagctctgtgacactgtatttcctgaacagcgcacgggaaccatagaacagcgatcactgtatctgctccatgctattgagcaggtcatccgcgacacggacatcccgacaaatttgaaacagtacggcgtcaaaggcagtgacctggactttttagtggaggccggtggccagcagcggcgtctcctggataataacagaaaagaattgacgatagaggagatccggaacatatacctctctgttctgccggaggatgaaaaatgacaaaacgacccattattggagttaccatgggcgatccctgcggaaatggccctgaaatcacgataaaggccctatccgatccagagctatatcggaagtgccgccccatcgtcatcggtgatgccgcctgcatgcagtacgcgctggaaacggcagaacggattggtgttgtgaaaaaggggacgctcgcggtgcaccttgttcattcagtagacgaagcactctttactttcggcagcatcgatgtatatgacttaggcattgtgaccgacatttctgacagaaagttcggaatcgcctgcccgctgggtggcgaagcggcttttcagtatgtaaaaaaggtcattgagctggccatggaaggtcaggtggatgccactgtcaccaatgcgctgagcaaagaggctatcaacatggcggggcatcatttcagcgggcatacggagatttacgcccattttacaggcactgaaaagtacaccatgatgctggcccacgaaaatctgcgggtggtgcacgtttccacgcacgtctcgttgcgggaggcttgcgacagggtgaagaaagaccgcgtgctggattgcatccgcatcgccaacgatgggtgcagatccttgggaatccagtcccccaaagtcgctgttgcgggtctgaatccccattgtggtgaggatggcctgttcggccgggaggaaatagatgagatccaaccggcgatcaatgcggcgctggccgagggcatctgcattccagacggaaaacccacgccagcagacacggtgttcagtaaggcgatcggtgggtggtacgatatcgttgtctgcatgtaccatgatcagggccacatcccactgaaggtaaaaggctttgtgtataacagggaggctggtaaatgggatgcggtggccggtgtgaacgtcacactgggccttccgatcatccgtacctcggtggatcacggaacaggctttggccacgccggacagggctacgcaaatgaattgagtctggtgaatgccattgactatgcgatccgctttgccgcctatcgttcgacggtaaaacaatgagaggacacagcatgtacatagtattggctgatgatcttaccggtgcgatggacaccgggatccagttccgcaaatatgggattcaaaccagtgtgatcgtaagtgcggatgactgtgagctgcgcggcgattcttgtgcaggggcagtctccatcaacaacagctcaagagagctgtccggctcagaagcgtatgaaaaaacactgcgggcggtccacaggctgtcactgtctccgcaggatatcctgtataaaaaaatcgattccatgatgcgtgggaatccggtgcaggagatcgatgcagcgctggaagcatctggctgcaggaaagcgatcgtgacacccagctttcctcaggaaggccgcattgtcagggagggagtcctgcatttgccggacggctcatctcaggatctactacagcggtggcacagggaatcccgctttccggttcggcctatcgcaaaggaaatgcttcaggacacggcgacggtaagagatatgctgttttcgccgcagacggaggtggccctcttcgatgcagaagatcaggaaacgctccggcgcattgcggatgtttgccgggatatcccgggtatcctgtactgcggctctgctgggcttgcacgggaactgcctgtcccgcaggatgacgcgcccaaaagtgcgccgtggaacggcgtaggaaagatcttcgttgtaacaggatccatgaaaatggagacagctgctcaaatcaggcagctcagtcagaaaggctttcagatcgttcccctccgcgttgctgcgctgaaccgcgcggaagacaaggctgaggagataagcaatgcctgcagggcgaccgctgcggcgctgcacggtgacggtccgggcgtggtgctcaccttcgactatctgctgcacgcagcatctaaaggagaggctgctgaaagcgagactacaccggagcagcgaaaggcggcgcttcatcttgcaggcagcttgggagcggtagttagggcgcaggatgaccgcctttatgatgctatgatccttgtcggcggcgacacggcactgagtatatgtcaggcgctcaacgtgcatcgtatctgtttgtgggacgaggtcacgcccggaatgcctgccgggatatttggtgatggcaacgcggctgggcttccggtcgtaacgaagtccggcgcgtttggcgattgcaaggcattgagccgcgcagtagaatatatcaaaaaagagtaagatcataaggagggcaagagaggctatatggcaaaagatcgctatgtgggagttgtacctcccatcgtaacgcccgttgacaaatttgagcgggtagatgaggctgccctgcgcggaatcgtaagacgctgcaaagatgtggggcttcatggtgtgttcgttgcaggctccaacggagagtgcatggctttgacacaggctgagcgcaaccgcgcgatccgcatcgttctggacgaggccggaccggattacccggtcatgagcggtgtgatggacagcagtacccagcgggtcatcgacaatatcaaggcgctggaggacatgggtggtgacgtggccgtcgtaacgccggtattctatgcacgccacgcgacacaggacgagacagtccggcatttcgaggagatcctgcgccatacgaaggtcaagctgatgatctacaatatccccatgttcactggactgaatctcacgccggagaccatcatccgcattgcggagttggacagtagggtgatcggctgcaaggatacatccggtaatttcccgggattccagaagctgctccgccatttcaaggactccgatttcatcctgcaccagggctctacaaaccttgccgcagccagcatgctgctgggcgcagacggctttgtcccgtcgctggcgccggtattcccgaaggtccacctgaaggtctatcagttcggcaaggctggtaacatcgcggaaaccatgaagtggaatgagttgctatcggatgtctgcacgctttatccgatggcaaaaagtcagacgtcgtccaccaaatatgccatgagcaaggtatgccccatgagctatcggtccattcttcccacggaacccatcacgcagagcgaaatggcacagatagacgcgctcatggacaaataccgggatgcgatgtaatcggccggctgcgggagtatatgtatgaaaaaattgattaaaaatgcaaacgacttcgtcctggctgtgctgatgctggcactgagcctgtttctgctgctctacccgaacattacatccaacatcccatctgtctcgatgggtggatattttacgcggccggatgtgtatatccggatgctggcgctgtttctggcagcagcctcacttgcgctgttgatccgctccctgaacctgggaaggaagtcccagcagacatcaggatttcattttacaatcaacagcaccgtcatcatgacggtggccgcgttgctactgtactgtgctttgctgcctgtggcaggtttctacatctgcaccgctgtgatccttctgttccttaacggcctgtatgtgtacaaggaaaataacaagaagctgaaggattactcaaaaaaggagttgacgaagtatgccgtcattgacgtggtctacaccggatgcatggtggccgtgctgtggctggtctttgcgaagctcctaggcgtccgcctgccgtaatcgtaccctctcgcagatgtctgcgaacaaaatagtaaaacaaaaatcagaagaaaacaggaggaaagtatgaaaaagttttttggcctgctccttgccgcagtgatgacgttcagtctggttgcctgcggagcccagaacgtccccagcgataacacctctgctgattatcccagcggccccatcacttgtattgttccctacgccgcaggcggcggctccgatgtccttacgcgcaccatcatgaagtacatctccttgcccaataatgtcaacatggtggctgtcaacgtagaaggtgccagcggctatactggttgcctgcaggccgcgaaatcggatccggacggctacactatccttgcgcacaaccccatggacgtggtgggcttcacgttgagcggctccaccaccgaggaactctataaggaaatggagctgatctgctgcgtggtgaatgactacggtgtggtcatgaccaacacgaccaccggctggacgagtctggacgagatggctgcctatgcaaaagagcatccgggcgaggtaaagctgggtaccactggcgtcaacacggtgaactatgccgatacgctgcgcctgatgaaggctcttggcattgagaacgatattaccgtcgtcccctttgatggcggttccgccgccaatacggcacttctgggcaaccagatccagctgttgaccatgtccgtttccgatacgaagagctacgtggcttccggcgatttctatggtctggtcgtcttcggtgaggatcgcgccaaggcgctgcccgatacgccctgcagcaaggaactgggtattgacatcaccaccaccaagccccgcggctactatgcgcccgccggcaccagccaggaggtgttggatctgctggcagacgccatcgaggaagtgaccaaaaccgaggaatttgcaacactggtcgagggctacggttgggagatcaactttgtccgcggcagtgagatgcagcccaagatcgaggcctgggccgaagagctggctccggtgttccaggagatcctgaacgcgaactgatcggcactacacattcccgtctgcggagagccgttgttatgacggctctccgcactggactatgatcatgcaaagaggagtacgcatatggaagtaattacagcagggatcggtgcaatgctctctgatcccatgtgctttgtggtactgctgttcggcgtgttgatggggatcatcttcggatgtatccccggtcttacggcaacactaggcgtggcgcttatgatccccatcacctacacaatgaccgcgcatcaaggcctgacacttctaattgccatctacgtaggcggcatcagcggcggcctgatcacagcaacgctgatcaacatacccggcacaccgtcctcgatcttcacctgctacgacggataccccatgacaaaagcgggaaggcctggcgaggcactgacgattggcgtgtttgccagtctcattggcggtaccgcctctgcgctggcactgatcctgatcgcaccgcagttggctaaggtcgtgctggcgttcggcagttgggagtacttcgcagtctgcattcttggtttggccgtcgtgatcaccatgtcttgtgaggacgtggtcaaaggcctgatcggcgcactgctgggacttctgttgggatgtgtcggcattgacgctgtttccggcgtgagccggctcgactttggcaactggcagctgcagggcggcatccagtccacagcgctgatgatgggtctgttcgcgatccgcgagatcctgcatcaatctgtggatctgaaagagccgagaatgcacatcagtatgcagaagaccagctttctgccgcacctgaaggaaatgaagggttgtgcaaagcccatcgcactgggctgcctcatcggcaccggcataggcatcctgcccggcatcggccagaatgctgcgacgatgatcacctacaatcagtcaaaatcggtgtccaagcacccagagcgctttggacacggctctcccgagggcatctgcgcatctgaaaccagcaacaacgccgtcaatggcggcgcattaatcccgctggtaacgatgggcattcccggcgatctgacgacctccgccctgctgggtggcctgacgatacatgggcttcaggccggcccgctgctgtttacgcagaatcctgacatcataggtacgatcatggtcgcctacgcattggcaaattttgtcatgtatatcatggagcttggcctcctgaagctgtttatccgcgccatcgatgtgaaattctccttcctgttcccggcgatcttgatgttctgtgtcatgggcgtacttgccctaaataatcggatgtttgatgtctggatgatgatgctctttggtgtcgttgcctatgtgttggagcaactgggcgtggacatgacgcccatcatcctcggctttattctcggccccatgattgagaagtacttccgctctgcgatgatcgcatcctctggaatgttcctggatgtatttacacgcccgatctcctgcgttttcatgatcgttgcagtgacatttttgctgctgcctctgttcaagatgcttcgatgcaggcaaaaggcgcgcaaaggctgatgatttacaggaggctgctatggtcaactgccgttatacggtcacggcggatatctacgaagacctcatcgaattgcagatacggttgaaaaaccgcacaccgtctcagcagttaaagttctgggggctcaatgtagggttcctgatagctgccattcttttcctgctgctggaacgggactattctattgtgctgcgcatcctgctcttcgctgccgctgcagcagcagcgggtcgcggggcctttcggatgtttttcacgcggttgcaggcaaaacgaaccgtcggcggatacctgaaacagctggacgatggctatctgggcccgcaccatctgtatacggcgggaccgagtctgctttgccgctatgggacccagacgaaaagcgtatccggctctgccatacagagtattatcccgctgaaaagctgtgctgcactggtggctgatggtgtcattttcgacgccattcccattcaggtagtgcaggagacacatctggatgatctgctgctgcggtttgccgcggactgccagcgacaggagttggcggagctggcagaaaagctccgccacgatctggaaaaggaagctcccattcagcaggtcttttcatggccggacgatgccgccacgctggagcgtcaggtcactggccatcggctctattatacaacagtccgcgcctggcggggcggtacgctgatccgcctgctgattgggctgtacggcttaggggtcctgctcctgggtggcaacatatatctcggagcgggctttttcctgctgggctactttttgagtcggcagttcctgctgtgttttacgcctgcggtacgccgcataacagctacagcgctgggccaagcctcgcaggatgcacagtgtacacttttcgtgcaggcagagaagctgaccctgcttcagcgcggttcggtgctgaccatggaaaagcctacatttgcggcgaaacgagcctcgcgaacggcactctgcttgtatggcacaaacgcggagatgctgacactcccgcgggagttagcggatgaaacgaacatgcagaagttttttagttgaggaatacaaacggttatgaaaatcattcgaacggttctgggagatattccggcatctgagattggaaaaacggactcgcacgaccatctgatccgcagcggcggaccagaggtcgtgcgcaaccctatgtttttaatggacgacactgccgcagcaaagcgggagttcggcgcatttctcgcatccggtgggaagaccatggtttgtatggaccctatcggctgcggcagaaatgtcggaaaaatggcagagatagcggaggcttaccgcggacagggaaatctggtcatggtcactggctttcacaaggcggagaactatgatcccagagtatcttttctggccacggtggatgagaaaaagatcgccgcgctgatgtgcctggagatcacagacggaatggatctgcacagctataacggtcctgtcgtggagcgtaccgcctacaaagccggactgatcaaggcaggaacaagttataggctgatcacacacctggagcagaaagcgctccgaatcgcggccatgacgcagcgggaaacggggtgtgccatctctattcatactgaaaatgggacgatggggccacagatactggatatactggctgcggcaggtgctgatttggaaaagaccgtcctttgccacgtccagcgcgatccgaacttggtgtactataaaaaactactggaccgcggcgcagttctctgcatcgaagaggcaaacaagccccacctgcgttctgatcaggcgcttgcggagatcctaaagcagctggtggatgccggttatgaacagcagcttctgctgggtatggacggcggccggcaggaagcgttggcggcttatatggcaccggaagggatcgccaacggcttatcctatctgtttgcggatttcgcccccatgctgcttcagcaggggatctccgcatctgcgctggagatgatgctggtccataatccggcacgcgttttctctatggaagtatcataagaaggacggaaatacctatgaaatttgtaatgacgcagtccctttgtgccgagggattggcacttttagatcaggcacacgttgactatatcagcgctgatgacggagatcccaatcactatccccagctgatgcaggatgcggatgccctgatcgtccgcatcggaaagtgtgatgcagccgctctggcctgctgcccacagctgaaggtcatcgggcggcccggcatcgggtatgattctgtagacgttacgcaggcaacaaagctgggcattcccgttgtggtcactccgggcgcaaacgggcgatccgttgcggagcataccgttgccatgatgctgtcgctgtccaaaaatcttgtcgaggcaaataacgagaccctgcagggtcactggagcatacgggatgcacataaagccttccaatgggaaggcaagactgtcggcattatcggtcttggtccgatcggtcgcgaaaccgcgaagatctgcctgggcatcggcatgaaggtcatcggctttgatagtttcttctcaaaagaacagatacagtcgtggggggtcgaatattgccagaacaaagaagaccttctgcgcacatcagatatcgtctccgtgcatatgccgctggtggaggccacccgaaatctgatctgcgcatccgagctggccctgatgaaaaagactgcgctccttatcaataccagccgcggtgggatcgtcaacgaggcggatctgctgcaagccctgacgtccggccaaattacggccgcagggctggatgtcttttgcagcgagcctctgcgtgtggatgaccctctgctccaggcgcccaatcttctggtcacgccgcacgccgccgcccagacgcgggaagcggtcattcagatggcgaccatgtgcgtggagggatgcctcgcggtttgccgcggggaacaatggccatacgtggtggacaagaacgtatatgatcacccgcgctgggcagattgcaaataatacaaacaggagcgtgctgtataaaagcacacaaaagcggttggaagtcatgcaacttccgaccgcttttctacatttcgcaatttttcgtatgtttgaattttctttataaatttggggccacaggattcggtgttctgtggtcgtcttctgtccgtcaggatcagaatgtccgccctgcccgctcccgttctgccgcaaggtccgctttcattttctgaacgaggtctttcagcttttcctcgcattcctcgcgggtatgggcgtagacgttgccactgcgctttttgccgtccggtcctcttggggaatatttgcctcctcagcggtgttcaccgagctgactgacgcaaccggtcccctgctttcaccgcggtaaaggtcgtcatattctccaacgcaagttttcgaacaggaggcatgatttgttccctctttgcaatgccgtggtcaaagtctaccgccgtttttacccgcatatcgtcggtgatgtgtgcgtaaatgttcagcgttgttgccacggaattgtgatcgataatggttgagagcgtttttacatccataccgtattcgagcaacgtcgtggcaaaggtgtggcgcagattgtggaagcagacgtgttcagagactgccagctccagtattttgctcaagcgctcgcgcacgacggcagggccgagcggcgcatccgctattttcggagagggaaatatcccgcatgaatggaaagtcgtcttatacatctccatgctcaataacaaacgaatgactcgcacaggcaggatactataaccgtagagttttttcacactgatatcaacggcctgcccatacccggtatgtctgttatattcccagtacggctccaccatattccagcgctccatgagtggcttcgacgcatcacgcacataaagaaaatctttttgggacagacctgccgaaatcacactggaagccatataatgccttagatattcacgcaagatatcagtttccttttctcttgccgcctcgcagggcgcgagatgttcatgcgtatcatagatgggaatgctgttgagatatacgccctctgctgaggtcatccgactgaacaatgtcatcaatcgaggcttggaacagccggagtccccagaagcagtcatgatgctgatcttacagggggcagccgcacgatacgactgttgcccggacaccatttgtggatacgaaaattctgaccgcctgacgaaagtgaactggcgccgctttcaccgggcggtttctcatatcaccatcacaccggacggcgcggtaaggcttacatttttggatgacgaaatgaagggaaaggacgaatgatacatggaaacaacggcgacaactttggaacgccgggtgcgggtgatccctgcaaccaaggcaccggagaccctccgtaaagcgcaagacggcaaaatgcgtgtagcggcatactgccgcgtctccaccgacagtgaggagcagctcaacagctatgaggctcaaaagagctactatacccagaagatccaggatagcccggattgggaaatggcggggatctatgcagacgagggcatcacgggtaccagcctcaagaaatgaacagagttcaaaaagatgatcactgcctgtaaacgaggccatatcgacctcatcatcacaaaatctctctcccgctttgccagaaacaccgtggactgcttggaaacagtgcgcctgctgaaagccaacggcatcggcgtgtacttcgaaaaagagaacatcaatacgctgacggaatccagcgagttcctgatcacactgttcagcggtttcgcccaggcggaatccgaatctctgagcaagaatgtcgcttggggcaaagcaaaaagtgcggaagccggaaaagtgaccttccaatacaaaaagatgctgggataccgcaagggtgcggatggacagccggagatcgtcccggaggaagccgaggtcatcaagcggatttatcaccggtatctggacggctgtacgctggggcagatcaagcgagaattggacaaggataatgtcccgaccgcacagggggtagaattctggtcgtccgccatcatccacaacatcctgacgaatgaaaaatatatcggagatgccctgctgcaaaagacctatgtcacggactgtatctccaagaaggtgaagaaaaaccagggcgagcgcgccatgtactatgtggagaacaaccatcctgccatcatctccagagagatgttcgatcaggtacggaacgagatgacgcgccgatccagcaagcgcaaggtgctgcaaaagagcggcaagacagagcttgggaaatattccggcaaatacgccctgacggaactgctggtatgcggtgagtgcggttccccgtacaaacgagtgacctgggcaagaaacgggaaaaagcggatcgtatggcgctgcgtgtccagattggagttcggaacgcaatactgtcacaactcaccgacactggatgagagcaagctccacagcgcgatcctcgcctccatgaacgagtttgccgccatccggcaggaggtctgccctgatgtactggcgatggcagaggaagccaagcaggcattatcgcaggctggtgcaaagctgctggaactgaagaaacacatggaaacggtgagtcgggagcaaagcgatctgctggaccggctgctggagaacatgggcgatgccgaactgaatgccaaaatgaaggcgctgacagacgagaaagaatccctcaaagcacagattctggacgcccggcagatggaagtcagcttggaggaacaggccacccgccatcagcagatgtgggacagcatcatggagtgcagcgcaggctacacggagttcgccgatgagttcgtccgtcagatcatccagaaaatcacggtagaggacgaggagaccattcgtatccacttccgggattcggagatggtgatcgaacaggaattataaaagatgtgaatggacaatcacataaagtagaggtaccatataaacaagaagttttgagatggtgaacactataagaggcaacaaccttggtgatgcatcttttctgtcaatacaaggcaaaaaagcaactcccgatagggtgttgctttttttattgagcttgtccggagtcgaagtttatcccccctcgcaggggaaatccggccgcaagctcccaaaagcaactcccgagagggtgttgctttcttgcttgaaacgacaaatagatgcattatgcacgaaacgcctattagtgatcacaatcgctggtatatgcaaaattattatggcgaaatatcgctccaaaaaggtacatcgtctcccaagcaccgctttttgtcgaatgcggtcgctgggtgtcgaacgaaaatgtttgttttcgacaaattgcccttgcatttgctgtctgtttgtggtatttttgatagcgtcagagcggttcgtggtgtgtatatggggaattgcgtgccgttaaaattatgttaaaggggaaagtgaatatggagaacaagatcactgtatgcgttgcggatgcggaccaggcgtatcggacagagctgtgcgatttcttgaagaagcagggggatatctgtctgatcggcgacactaccgacggccgtgaggcgctggcgatggtggaggcacagcaccccgccgtgctggtgctggacacggtgctgcccggactggacggcacgggcatcctgcggcggctgaagggcaagtccgagacgcggtgcattgtggtgacggaattccgcaccgccgaggcggcccgggacatccgggatgccggcgcctatgcattcctgcccaagccggcggacgacacctcagtgctggagcatatccgccacgcggcaggcccgcgctgcgacctgccgctgcagcagctggagatgatggtcacggccatcatccacgagatcggcgtgccggcgcacatcaagggctaccagtacctgcgggagggtattatcctgacggtacggaatatggaggtcatcaacgcggtgacgaaggtgctgtatccggagatcgcaaagcggttcgggacgacacccagccgggtggagcgcgccattcgccacgcgatcgaggtggcgtgggaccgcggcgacctggaaacgctgcagaaatactttggctatacggtgaactccgcgaagggcaagcccacaaactccgaattcatcgccatgatcgccgatcgcctccaattacaggcccaggaaatgtgaacacgatatatccgggaaatgtgaacaaacccatgcaaaaagggatacctttatgtacgcaaaaaaggcgccgaagggcgccttttttatacctatatgatactttcagttcacgcttatgacatcttccgatacattgtgggcagacagccgtactggtccttgaaggcggcggtgaatttgctctggctttcatagcctacccggcgggctacctccgccatactggcatccgtctcacggaggaggcgggcggccttctccagacggtgctccttcagatgggcggcgatggaggtgccgtacacatccttgaacacctctttcaatgtggtcgggttgatggggtacagatggcagaggtcctcgatggtgatacgctggtccatgtgcgacagcaggtagtcgtggatctcccggatcagccggacctgctctgcctcggcgcgccactggggacaggccacgtccatgacctgctcgatgagctcgtgcagcagccgggcctgggcggtgtcggcggcgtggtagtagacctccttgccgtcgcggcgggtggtcagcaggccgctgtcccgaaggatgcggaggtggtgggagacggcggggctggacatatccatcatggcggcgatgttcaccacgcactcctcgcagtggcacaacagccagaagatgcggatgcggttggcgtcgcccagctgccggaaaatatcggaaagttcctgaaaggtgtcctctttttccagcatctggcggacgacctccgtgtgggccggctcttcgccgtggtagtggggcagggacgggttttccatacgatgacctccgtttcgcccgaaaggcaatggttttcgcccgggcggcagggagtgccgccggaccgttgacatttgcggtcaggtacattatactacgcccagaacgattaaacaagtacttaatactttaagtgctgcgaaaggagtcatcactatgaaaaagacatacagcatcgaagttgactgcgccaactgcgccaacctgatggaggaagctgcccagaagactgagggcgtggcctccgccgtggtgaactttatgacgcagaagatgatcgtggaatttgcggagggcgcagaccagaaggccaccatgaaggcggtgctgaaggcctgcaagaaggtggagccggactgcgagatcgaactgtaaaaccacgcaaagacttccctgcgggaagcctttgacatacgcctgcgggcgcgggatggggagtttcgtgctccggcacgagtaactttctttttttgtaaaaagaaagttaccaaagaaaaccactcaaacctacggtttaaggatcccttggcgcggggagggtttcgccgccccggcggcgagtcggtttccccccgacggggaggcggtctccggcggccacatttctttctgcgaagaaagaaatgtggaaaagaaagtcgcttagacctacggtctaaggaccccttggcgcggggcaggcaagtgcaaatttggcggtgctggcttcgcggaattggtacggcgggtatcgttgtcggttcgggggactgcttgtacctcctgcgccgctgccgctgacaacagcgagggtaggggttggtgcgctggtcgagtggcgattatcaaatcgcgcctttgccgccgcaaggcggcaaaggtaggtgtgcccgtcgggcacaggatataattatttcttagcctgcgacacggcagaacgaataatttttgccgtagtagcaggcagcggcagcggaaagctgtgctggcacagtcgggggaacgacaacgatcaggaaaacgccggttacgtgagggaaagcgcgggtggcagtgaacaggcatagcgcgctgaggggttcttagaccgtaggtctaagcggtgcttttggctacttttgtcaccgcagacaaaagtagctcgcgccggggcgcgaaactatccccgtcggagacaaataatgcggttgcgccgctgcggcggcgagtcggtttccccctgacggggaggcggcctccggcggccacatttctttctgcgaagaaagaaatgtgggaaagaaagtcgcttagacctacggtctaaggaccccttggcgcgctgtgggtcatgcagatttggcggtatgcactcgcgcatgaagtgcagtgggtaacattgtcggttcagggatcgcttgtacctcttgcgccgctgccgctgacagcagtgagggtaggggttggtgcgctggtcgagtggcgattatcaaatcgcgcccattgcggcgcgaagcaccgcaatgggtaggtggcggctaacgccgccgggggtatgggggcacctgtctccctgcgggtcggtcggttcgcggatctgacacgccaccggcgtgtcattcaacggcgcgaagcccttaaggggaaggcttgggggggtgcgccactcgaggggaaggctttgggggatggcggtaggagcgaaacacggctaccgtggctgaggcaagcggccgcgtcagcctccgcgccggtgaacacaggcacagtccttttatccgataacgacgacgaaaggttatgcccgcgagaatacgcgggaaatcacaactgagtatagcgcgcgaggggttcttagaccgcaggtctaagcggtgcttttggctacttttgtcaccgcagacaaaagtagctcgcgccggggcgcgaaactatccccgtcggagaaaaataatgcgcttacgccgctgcgcggctacacctcatccggcgctgcgcgccaccttcccctcaaggggaaggcttgaggggtgcatcattcaacaccgcgaacccctcaaggggaaggcttgagggtgcgccactcacaccgcggaccccctcaaggggaaggctaacggaggtgtgtcattcaacaccgcgacccatcaagggggaaggcaaccggctgcgggcgggacggcggtgcggatacaggaaaggagaaacgctatgacgaaaaaacaaaagaaaatgctcatacgcatactcatcacggcggcgatgctggtcgcgctgtatattatcccggtgacggggtggctgcggctggcgctatatctgacagcgtatctggtcatcggctacgacattctgaaaaaggccgggcagggcatcgtcaacgggcgggtgttcgacgagaacttcctgatggccgtggccacggtgggcgcgttcgcgctggccatctatgagaaaagcggcgactacaacgaggccatcgccgtgatgctgttctatcagatcggcgagctgttccagagctacgcggtgggcaagagccggaagaacatcagcgcgctgatggacatccgtccggactacgccaacattgagcaggacggccagctggtacaggtggacccggacgaggtggccatcggcaccgtcatcgtggtacagccgggcgagaaggtgcccatcgacggcgtcgtcaccgagggcagctccaccctgaacaccagcgccctgaccggcgagagcctgccccgggacgcccgggagggcgacgaggttatcagcggctgcatcaacatgaccggcgtgctgaagatcaggaccaccaaggcctttggcgagtccacggtatccaagatcctggagctggtggagaactccagctcccgcaagtcccgcagcgaggactttatcgccaagttcgcccgcatttacacgccggtggtatgctacagcgcgctggcgctggctattatcccgccggtgatccggctggtgggcggcatggacggccagtgggagcagtgggtataccgtgcgctgacgttcctggtgaccagctgcccgtgcgcgctggtggtcagcattcccctgagcttcttcgccggtatcggcggtgccagccatgagggcatcctgatcaagggctccaactatctggagacgctgtcccaggtaaagacggtggtgttcgacaagaccggcacgctgaccaagggtgtgttcgaggtgacggcggtacaccacagcgacatggacgagcagaagctgctggaatacgcggcgctggcggagtgcgcctcctcccatcccatcagcaagagcctgcagaaagcctacggcaaggccatcgaccgcagccgtgtgacggacatccaggagagcagcggccacggcgtcaccgccgtggtggacggccacacggtggccgccggcaacagcaagctgatggtccagctgggtattccctatcacgactgccacagcgtggggaccatcatccacatggcggtggacgggcagtacgcggggcacatcgtgatctccgacgtggtgaagcccaacgccaaggcggccatcgccgcgctgcataaggcgggcgtggaaaagaccgtcatgcttaccggcgacgccaagaaggtggcggacgcggtggcggcggagctgggcgtggacgaggtacacagcgagctgctgcccggggacaaggtggcgcaggtggagcagctgctgggcgaccagcgcgggaaggccaagctggccttcgtgggcgacggcatcaacgacgcgccggtgctgagccgggcggatatcggcatcgccatgggcgccatgggcagcgatgcggccatcgaggcggcggacgtggtgctgatggacgacgagcccatgcagatcgccaaagccatccacatctcccggaagtgcatcggcatcgtgtatcagaacatcgtgttcgcgctggcggtgaagttcgcctgcctggtgctggtggccatcggcgcggccaatatgtgggcggccatcttcgccgacgtgggcgtgatggtgctggcggtgctgaacgccatacgggccctgcgggtgaaaaatctgtgagtgaaaaaaggaccggctctcgccggtcctttttagcgcctaacatttttgtatgaattgcgtaaagtgtgaaaatgggggtagcattttcggggggaggctggtataatgtgcgggtagaagatgttgatttatgttgtcaacataatatggcatattagatatgcttgtaaaactttcgcatttatattagttgcataggagaaacatatggagacctataagagacggcggggagaccggaaggacggccggctgctgcgggagctggattccctgcacttcatcaccggcatcatctacccaaaccggtgcgataatgaggcgtatatctccgtgaaggtggacctgaccgccatgaacgcgtatctggccaggaagaacgaggaggagaaggactttccctacaccatgttccacatcgtggtggcggcgctggagaagaccatcaccctgcggccgaagctgaaccgctttattgtgaacagcaatttctatcagcggaacgaggtgtccgccgcgttcgtggtgaagaagcagttttccgacaagggcgcggaggcgctggccttcctgcacggaaaggagacggacacggtgacggaggtacatgactacatccgccggcaggtgacggagtgccgcagcgagaaggtggatgcctccaccgcgggcatggatatgttcaataagatgccccggtggatgggaaaggccatcgtgcggttcctgatgtttctggatcgccacggctgggtgccgtccgacctcatcgccaccgacccctattacagctctgtggtcatctcgaacctggggtccatcaagctgaagtgcggataccaccacctgaccaactggggcacctgctcgctgttctgcatcatcggcgagaaaaagaagtccccgtttatcaacgaggacggcaccgtgaccatgcgggagacgctggagctgggactgaccattgacgagcggttggcggacggctattactactccaagtctgtgcggctgctggagtatctgctgacacacccggaggagctggaaaagcccatgagcgaggaggtacaatatgagtgaagtaaagaccccgtggaaggactatatgggcgatgtgcccatgcacctggattatttccagggcagtatgttcgaggccgtggagcgcatggccgagctgtatcccaacaacatcgcctttgatttcatgggcaagtccaccacctataaaaagatggtgcaggagatcgagaagtgcgccaagagcctgaagaccctgggcgtgcggcccggcgacaaggtgaccatcgccatgcccaactgcccccaggccatctatatgttctacgcggtgaacctggtgggcggcatcgccaacatgatccaccccctgtcggcggagaaggagatcgagttctatctgaacgcctccgagtccaccacggccatcaccctggatcagttctacgacaagttcgagcacatccggcagaacaccggcatcatcaacatcatcatcgcctccgtaaaggacgcgctgagccgcaccatccgggcgggctatatgctcaccgaggggcggaagatccagaagatccccgaggatgcgccggtcatccggtggaaggaatttatggatatgtcccggtactgcttctacaagaactaccgggtggagcgaggctacaacgatcccgcggtcattctgtactccggcggcaccaccggcaccacaaagggcatcgtgctgaccaacggcaacttcaacgcactgggccagcagatcatcgccaccaaccccatgttccggcccggcgaccggatgctggcggccatgcccctgttccacggcttcggtctgggcgtgtgcgtgcactccatgctgagccagggcggacggtgcatcctcatcccacggttcaccgccaagagctatgccaagcagatcgtgaagtacaagtgcaactttatcgccggcgtgcccacgctgtatgaggcgctgctgcgcctgcccagcatggacggcgcggacctgagcagtctgaagggcgtgttctccggcggcgacagcctgtctatcgagctgaagaagaagtttgacaagttcctgtacgaccaccacgcggtcatacaggtccgcgagggctacggcaccaccgagacggtgacggcctgctgcctgacgcccaccaacatctacaaggagggctccatcggcctgcccttccccgacacctatatcaagatcgtggagccggacaccgacaaggaggtgccctacggcaccgagggcgagatcctgctggcgggccccaccgtcatgaaggagtacatgaacaaccccgaggagacggcccgcaccctgcggacgcacgacgatggcctgacctgggtgtacaccggcgacctgggcaccatggacgaccagggcttcatctacttcaagggccgcgccaagcggatgatcatcacctccggttacaacgtctatcccggccagctggagaacattctggacgcccatgaggacgtgcagatgagctgcatcatcggcgtgcccgatccctataagatgcagaaggtcaaggccttcgtgatgctcaagcccggcgtgcccgccagcgaggccaccaagcaggagctgctgagctactgccgcaagcacgtggccaagtacgccatgccctacgacatcgagttccgggacgagctgcccaagaccctggtgggcaaggtggcctaccgggtgctggaggacgaggagaaggcgaggatcgccgcccaggcagcgcagccggaggcgtgagcaccctccccaccgcataaaacagaaaaggagactgcctgccatggaagtggagctgatacggcaatacacactgatcgtagactttctgggccacgtgctgggccctgactatgagatcgccctgcacgagctggaggacgactccaaccggatcatcgccatcgccaacggagagctgaccggacggcacatcggctcccctctcagcaacaaaatgctggagttcgtggctgggaacctgtacgagacgcagaactatgtgctgaactttgagtccgtgtccgccacgggcaagaccatgtgctccaactccatgttcatcaagggacggcacggggagctgtccggcctgctgtgcatcaacttcgatgccagccggtatgaggaactgagccgcagggtcatggagctgtgcggcggcggcgtgaagcggggcgtacccagcggcacgcggctcatcgccgacggcaacgacccggtggagacaccggtacgcagcggctatcccacgtccattgccggcgccaccgccagcatcgtatcccaggtggtggccaactatccggtggaggtggaccggctgacccaggacgagaagatggagatcatggacattctgaaccgcaagggcgtgttcctgctgaagggatccgtgagtcatgtggcgcagacgctgcacagcagcgaggccagcatttaccggtatctgggcaagctgaacaacaagtgaaaaagggcgcccgcgggcgcccttttttcctttcaaacattgaccggaaaacagaaatgctatataatatatagtcacaaacaaggactggaggcgacaggattgaaaacagagaccatcgtccataaatcagccgcacccatctacgccgcggcggtaacgtgggtgctgtacgcactgctgtttccgctgtatcaggtggggcacttcctgctggcggcggcggcttccgccgttgtggcactgatcgcccggatgttctgccgggatgtgaccgagaccgtggaggtaccggaggagccggtgagcaccggcaatgtggacctggacaaggccatcgccgagggcgacgcggccatcaaggccatgcgggcgctgaacgcccgcatacaggatgagactatctccggccagatcgaccggctggaggaggtcagcggcaagatattcgactatgtgaaggcgcacccggagaagctgccgcagatccggaaattcatgtcctactacctgcccaccacgctgaagctgctccgcagctacgacgagctgagccgtcagggcgtgtccggccagaacatcaccggcaccatggagaaggtagagggcatgatggccaccatcgtgctggcgttcgaaaagcagctggacagtctgttcggcgaccaggccatggatatatccacggacatcacggtactggacaacatgatggcacgggagggtctgaccggcggcgacgccgtgcaccaggcggcccaggaaaacccggtggccgacccccagccggagttggatatccgcaatgccggggacgcgcagacacagccgccccgggcggaggacagcgtggacgccgggaacggcattacgctggagctgtgagaacaatgtgtataattttgtgagaatataacagaaaggaaacaaccgccatgaccgataacatgatgcccgagctgaccctgacccctgacgataccgccgctgccgccgcagtggaggtgccctccctgacgctgacgccggaggccccggaggtccccaaggaggaggaaaagaagatcgagccggtggagatggacgacaagctgctgaccgaggaggaaaagcaggcggtggaggccttctcccacaagatcgacatccgcgacaccaaccaggtgctgcagtacggcgccgcggcacagaagagtgtggcgtccttctctgagaacgcgctgaacaacgtccgcagcaaggacatgggcgagatcggcgaggatctgagccgcctggtggtggaactgaagggctttggtgaggaggacgagaagaaggggctgttcggcctgttcaagaaggccagcaacaagctggagaccatgaaggcccagtacagcaaggtcgaggccaatgtggacaagatcgcccaaaatctggagaaccatcagatcacgctgctgaaggacgtggccatgttcgaccagatgtatgagctgaacctgaagtactacaaggagctgaccatgtacatcctggccggcaagaagcgcctgaccgaggtgcgctccacggagctggaggcgctgcggaagaaggcggagcagacgggtctggccgaggacgcccaggcctacaacgacctggtgaacctgtgcaaccgctttgagaagaagctgcacgatctggagctgacccgcatggtatccgtgcagatgggcccccagacccggcttttgcagaacaacgacacactgatgatcgagaagatccagtcctccctggtgaacaccatccccctgtggaagagccagatggtgctggcgctgggcatggagcacagccgtcaggctaccgccgcgcagaatgccgtcaccgagatgaccaacgatctgctgaagaagaatgctgatacgctgaagatgggcaccatcgccaccgcgaaggaggccgagcgctccatcatcgacatcgagacgctgcagcacaccaaccagcagctgatctccaccctggacgaggtgctgaacatccagaaggagggcgcggccaagcgcaaggaggccgaagtcgagctgggtaagatcgagggtgagctgaagcagaagctgatggagctgcggggataaccacagcctgttcgtaggggacggcgtccccgacgtccctcagcgcgaagcgctgccattcgtaggggcggacgactctgcccgcccctaccctgcggcgctcctccaatgcaagaagacctctgacaaacatctccctccaaaggaggaaactacatggaatttttcaaaaaacgcggcgtggcactggtggtactggcgctggccatcgccggcgcggtgttcatcgggcagagccgcaaggacggctttatcgccaagaagcccacggagctgctggacgtgcagtaccaggactggatctgtgacgaggccggtctgctgaacggacagacggagcagctgatccgggactacaacgacagctggaacagcaagtattacgccattacggcggtggccagcatcgaccatctgaccggctgggacgcggaggattacgccgccaacctgggcgagaagtgggggctgggacgcaacgacatgatactgctgctggtgaaggacggcgactggcaggtctactgcggcgacaatgtgggctacaccatgaccgacacccagcaaaatcagctgcggcaggccattgagaccacctattacagcggcgacttcgacagtgccgtgacagccttcttccggcaggcggacgtgttctacgcccaggcgaagctggacggcggcgacagcaatgacagcggctggtacgccccggcggcaccggcggccagcagcggcggcacgtccatcggcagcgtggtggtgctgatcgtcggtatcttcgtggtgtggatggtgctggatgctatgcggtacagccgctatcgccggcggtatatcgtgggcgcaccggtgaatgtggtgcgtccggtgtactatcccattttctggggcagacgctacgcgccgccccggcctcccagagcaccccgacccccacgtccgccccacggcggaggaccgcgaccgccctacggcggtggtccccggcctcccatgggcggcggcccgaggcccggcgcaccgcgaccgccccggcccaataaccggcccggcggcggtccgagacccagcgcgccccggcccagccggcccagtcgtcccagcggcggcagcgggttcagcggcggcggcttcggcggcggttcccgcgggggaagctcccgaggcggaggctttggcggcggcggtttcggcggcggcaagcgtcgataagcatagtaaaaacacccggcctgacggccgggtgtttttgcgctgcggggccttcgaccgggggtgtctactccgaagagctgacggaagctaccgcacctgggtgatgaactgctccaggccctgccgcagcagggacgaggcggcctgtccctcccccgcctcgatatgggcggtgaattgggccagccgttccagacagcggtcgatgccggtaagctggatatactccttccagaactccaggttcacccgggtaaaggcgttgaacagcagcggtgtgatggtgttgccgctgagaaaggtgatgccccggtggtagcggaacagggcctcggccagcgcatccgtcccctcctgcgccgcctgctccgcctggcgctgtaaggcctgcagcgctgccatgtctgccggtgtgtgccgcgcagccagctcctccatggcggggccctccagataatagcgcagctgaaggatactgcccgccgttttggcatccgggagaccgccatggaaatccatgatggcccgcagcgtttccaggctgccggtctgggcgtagtctgccacggtgacgccgcggcgggaggcgatgtccagaaagccgagacgatgcagctcccgcaatccctcatggaccacggtcttgctgatcttcatttcatccgccagctcacgctcagtgggcagccgatcccccgggcgcagctcgccggagaggatcatgccctccagctgctggatgaacagctccttgacggtgggggcgacgatctcacgaaaggccatagctcatgctcctttgctttcttttctggtccgaccaggaccatataaaaagttatcacacctttggcggaaaagtcaataggatattggcagaaaagttggtattataggtataatagagcttaaaatcacaacgctgctcccctatgagagaaaaatatctctggtcagagcagcagataacggaggagagagacgatgcgcgacatcaacggcagcaagcctaccagcttccccctggacgaggaaaagctctcgttcaagatcccctgtcccgaccggccgccccgggagaagatcctgaagctgggcagcatgatcaccaaccgcattggcctgaaggccaccgctgacgaccccgaatactgggggctggatgcgctggtgaccgatgagatggcggacgtggcactgaaaatgggcgtccgcaagcccaagaccatcgagcagctgatgaagctgacgaagatggaacgcgagcccctgcagaagctgctggacgagatggcctggctgggtctcattgagtacaactgggagaacctggacggcaaaaacccgaaccacgagaagcggtacatcctgcccctgttcgtgcccggcagcgccgagtttttgaatatgcggcggagccagatcgacgggcacccggaggtggcggcgttctttgagcgcatgaccatgctgcccctggagaagatcacgccgatggtgccccccggaggcgcgggcatcggtatgcacgtgatcccggtggagaaggccatcgagacggagcaggaggccatcgggctggagaagatctcctactggctgcacaagtatgaaggcaagtacgccaagagtatgtgctcctgccgcgccagccgcgacaagctgggcgagggctgcggcgacgatgtggagaactggtgcatcgccgtgggcgacatggctgactatgtggtggagacacagcggggcgagtacatcacctatgacgaggcgatggccatattcaagcaggcggaggacaacggcttcgtccaccagatcaccaacatcgacggcgagcagaagatctttggtatctgcaactgcaacgtcaacgtgtgcaacgccctgcggaccagccagatgttcaacacgcccaatatgtcccgcagcgcctatgtggccgcggtggagacggagaagtgcgtggcctgcggccgctgtgtagagaactgtcctgccggcgcggtgaagctgggtcaaaagctctgcaccaaggatggctatatcgagtatccccgggccgagctgcccgacgaggtgaagtggggcccggagaagtggagcatcgactatcgggaccgcaaccgcatcaactgctacgacaccggcaccgcaccctgcaagaccgcttgccccgcccacatcgccgtgcagggctatctgaagctggcggcacagggcaagtaccgagaggctttgcagctcatcaagcgagaaaaccccttccccgccgtgtgcggccgcatctgcaaccgccggtgcgaggatgcctgcacccgcggcaccgtggacgaggccgtggccatcgacgaggtaaagcgctttatcgcccagcaggatctggacgcggagacgcgcttcatcccggagaaggtcattcccaaggtggacggcgaattcagcgaaaagatcgccatcatcggtggaggccccgccggcatgagctgcgcctactatctggcggaaaagggctatcgccccactgtgtttgaaaaggagagccgtcccggcggtatgctgatgaacgctatcccctctttccggttggaaaaggacgtggtggaggcggagatcgacgtgctgcgcgcgctgggcgtggagttccgctgcggcgtggaggtgggtaaggacatcaccattgcccagctccgtgaggagggctacaagggcttctatgtagccgtcggattgcagcacggcggcaccctggccgttcccggcggtgacgcggaaaacgtgatctccggtatcgacttcatccgcggcgtgcatctgcgggacgaaaaggcgctgaagggccgggtggtggtcatcggcggcggcaacatcgcggccgacgtagcccgcaccgccgtgcgctgcggcgcggagagcgtgagcctgtactgcctggagggctatgaggagatgcctatgggcgaggaggaccgaagcgagtgcgagcgcgagggtatcgccatttacgccggatggggtcccaaggaggtccagaccgagaacggcaaggccgccaacatcgcctttgtcaagtgcctgagcgttaaggacgaaagcgggcgcttcgcgccggtgtacgatgagaacaccgtgcagatggccccctgcggcacggtgctgtactgcatcggccagaaggcggaatggaagacgcttctcgcgggcacccaggtggaattcaaccccaacggtaccgccaaggccgatcccgtcacctatcagacggctgaaccggacatcttcgtgggcggcgacgcctataccggccagaagttcgccatcgatgccattgccgccggcaagcagggcgcgatcagcctgcaccgctatgtgcagggcgccgcgctgaccatcggccgcgaccgccggcagttcatcgagctggacaagaaaaacgcgctgatcgccgtggacagctacgacaacacgccgcgccagcgcatcggctacaacgacgccctgcgtaagaccttccgggacgagcgcgtggccttcaccgccgagcaggtgaaggcggagacagcccgatgcctgggctgcggcgccagcatcgtggaccccaacaagtgcatcggctgcggtgtgtgcaccaccaagtgcgcctttgacgccatccacctgcaccgggagcgcccggagtgcagcaccatgtacgcctgtgaggacaagatgaaggccattctgccctacatgatcaagcggaacatcaagatcaagaaggcggagcgcagggccaagaaagcggccaagtgatatgcacgagctgggcattgttttccacgtgatcaagaccgtggagcgcgtgggcgcggagaatgacctgacccgcgtggtgggcgtaacgctggagctgggcgaggtgtgcggcgccatcccaagggagcttgtcagctgctgggactgggccgtgcagagatccgacctgctgcggggcgcgcagctgcacatcgacacgctgcccgccgtgacacactgcggcgactgcggtgcggactaccccactgtggcccacgggcgggtctgcccccactgcggcagcggggatacctggctgctgcggggcagtgagatcagcattaaagagatagagggtgcgtagtatggatacctataagatcatcgaagtaaaagagagcgtgtttgccgacaacgaccgggaggcggcacgggtacgggaggcgctgaagcaaaagggaacgttcctgctgaacctgatgtcctcccccggcagcggcaagaccacaacgctgctgcggaccatcgaggcgctgaaggacgagctgcggatgggcgtgatggaggcggacatcgactcggacgtggatgccgccgctattgccggcgccggggtacggtctatccagctgcacaccggtgggatgtgccacctggacgcgggtatgacggaacagggcctgcgggagatcggcacggacgatctggacctggtggtgctggaaaatgtggggaatctggtgtgtcctgcggagttcgacaccggcgcggtgaagaacgccatgatcctctccgtaccggaagggcatgacaagcccctgaagtaccccctgatcttcaccgtgtgcgatgtgctgctcatcaataaaaccgatgtgctgccctatttcgacttcgacatggagaaggtgatcgaatacgctcaccggcgcaatccgaaactggagatcttcccggtatcggccaagaccggcgagggtatggacgcctggtgcgactggctgcgtaagcaggtgaaggattggcaggcatgacaaaaggccccgcggctttcgccgcggggctttgtaaagcgggaaaagctggctgttccggccgcgaaaaaacagccaccctatcgggtggctgttttttgcttgcaaaagaacttacttcagctcgaccttgccgccggcctcttcgacctgcttcttcatagcctcggcatcgtccttggacaggccttccttcagggtgtggggcacgccctcgacggcagccttggcctcggccaggcccagaccggtgatctcgcggacgaccttgatgaccttgatcttctgggcagcgtcgaagccagccaggaccacgtcgaactcggtcttctcctcagcggcgggagcagcagcgccggcagcgggagcagccatagcggcggcggaaacgccgaactcctcctccagagcgtgcaccagctcggacagctccagaacggtcaaacccttgatctcttcgatcatagcagtaatcttctcagacattgtgatagcctcctatttgtaagatttaaattgatgttgtgcaggccctgtgcctgcgatggaaagggggccgaattactcggcggcagcgccgttcttctcggcgatctgcttcagcacgcaagccagaccggaaataggggccagcatggtgcccaggacctgcgcctgcagcacgggcagggcgggaatggacgccagcgcgttcacggtctccatggagacgaccttgccctccatgaaaccgcccttgatctcgaacttgtccttcagcttctttgcgtagtccgccatcacacgggccggggcgacgggatcgtcaacacagatagccagagaagtggtaccgttgagctgatcgtccagttcgttcagaccgcagttgttgaaagcgaaacgcagcagggtgttcttgatgacagcgtactcaatgttgttcttacggcactccgcgcgcagctcggtatcctctgccacggtgatgcccttgtaatcaacgatgacaccggctgcggaattctgcagcttttcggtcagcgccgccacgatcgcctgcttttcagacagaacctttgcgttgggcattctttgatttcacctccgttagaattgtcggtgcgttcaaaaaaggaaaccgtcctcatgccaaaggacatgaggacggtaaaagcaatcaaaatgacttgccatcctcggcagggcttacggctttcgccacctgctgtctttggaacgcaaccaatattatatccaaggcttcacagcttgtcaagccaaagataacaattttccggcattttcaggacacttcctgaaagcgccccgggtaccaagataccgagccgccgttcagatctccgcgcagatttttcgctgggcaaggcgaagcctcgcaggaatactttgtgtatttcaagaggcttcaacgcaggccggcgggaaatctgccggtgagctgtgcggtggagtcggtatcgcggtgccctcacaaaattacagctgcttgttggcgttcatcttcacgccgggacccatggtggaagcggccacgcaggacttgatatactggcccttggcagcggcgggcttggccttgatgatggcgccgatgagggcggaatagttctcaaacagcttgtcagcgccgaaggacaccttgccgatggggcagtggatgatgttggtcttgtccagacgatactcgaccttaccggccttcgcctcctgaacggccttggcggcgtcgggagtcacggtgccggacttgggagagggcatcagacccttggggcccaggaccttacccagacgacccacaacacccatcatgtcgggggtggcgacgaccacgtcgaagtcgaaccagttttccttctggatcttctccaccaggtccatctcgcccacgtagtcggcgccggcggccttggcagcctcggccttgtcgcccttggcgaacaccaggacgcggacggacttgccgatgccgttgggcagcacgatggcgccgcggacctgctggtcagcgtgacgggagtccacgcccagcttgacgtgcagctccacggtctcgtcgaacttggcggaagcggtcttgcagatcagctccagaccctccttgggatcatacagcgtagccttgtcgatctgcttggcgctctcttgatatttcttacctctaaacatttcttacaccctccttactcgccgaccacgacgcccatggaacgggcggtaccggcgatcatgctcatggcagcttccagagacgcggcgttcaggtcgcgcatcttcagctcggcgatcttctgaatggaggccttggaaatggtggcgaccttctccttgttgggaacgccggaaccggactcaatgttgcactccttcttgatgaggacagccgcgggaggggtcttggtgataaagctaaaggaacggtcggcatacacggtgatgaccacggggatgatcaggcccatgtcattcttggtgcgctcgttgaattccttggtaaaggcagcgatgttgatgccgtgctgacccagggccgggccaacggggggtgcgggagttgctttgcccgcggggatctgcagtttgacgtatccaactactttctgtgccatttgtaggcacctccttcaataaaatgtggtagcggcggggatacttgccgcttttggcgagacgcgcagcgtctctcccactttgccggcacacctgcgccggacttccgcgcagacgttctgcgctcagttactgctgacctcgacctggtccagttcgagatcaacgggggtctcgcgtccgaacatggatacgaccacgcgcacccggttcttctccggctcgatctcctccacggtaccggtgaagctggacagcgggccctcggtgatacgcaccgtgtcgcccacatggtagagcacgacgatctcgcgcttctccatgcccagcgccgccacctcgtcctcggtcagggggatagccttgtcggcctcgcccacgaagccagtgacgccgcggatgttgcggatcaggtgccaagtatcgtccgtcatgaccatcttgatgaggacatagccgggaaataccttccgctgcacttccttcatcacgccggtctcggtgacctcggtgaccgtctccatcgggatctcggtcttgaggaccatgtcctccatcccgcggttcaccacggatttttcgatggcggcctttaccgcgttttcatagccggaataggtatgtgccacataccactttgcgttatcagccatgtcctgtaccttagaacagaccgatgagggtatccaccgccagcacagccacggcatcaaagatccagatcgccgcgcccacgatcagggagcacagcaggacggtgccggtgttcttggcggtagtcttgccatcaggccaaacgaccttcttcagttcgcttctcatctcgcggaaccacttgccgcgatccttactgaccttcttctcttcagccatgtcaatatctccttccggttacttcgtctcgctatggacggtgtgctttctgcagaaggggcaatacttgttcagctcaagcttgtcaggggtattcttcttgttcttcatcgtgttgtagtttctctgcttgcactcgttgcatctcaaagtgatcttcacgcgcattaacggcacctccttattagattaggcttccgttccggaacgcccttttgcctccctgccggatgatctccgcctgcgcctccgaagcgaaaaagcgcgcaaaaagaaagcacccactcacaggtaatgcccactataccacactttcccccgccggtcaaccgttttttgcagaaaaatcccgtatttttcacggtttcgtcccattttctgttgcttcccgccgccattttgtgtatgatagagccaacgtgaaaaaacgcggcggcgcacgccgcgaaaagtgaggtacatccccatgaagatcatggccatcgactacggcgacgcccacaccggcatcgccatttccgactataccgagacgctggcgggctactccgacaccctccactcccgccgacaggaggaggtgctctccggtatacagcggctcatcgccgagcacggcgtacagctgctggtgctgggctacccccggaacatggacggcaccgaggggccccgggccgagaaatgcgccgccttcggcgcgctgctgcggcaggcgaccgggctggaggtcatcctctgggacgagcgccgcaccaccatcgacgcccacaacatcctgtttcagaacgggcaaaacgccaagaagcgaaagaagaccgtggatgcggtggccgccgcgctgatgctggagggctatctgacccgccggaggctggagggcgcaaaatgacggatgttatcgttatcggcggcggcgccagcggcatgatcgccgcgctgaccgccgcggaaaacggccgcagcgtcgtcctgctggaacggcagagccgggtggggcgcaagctgctggccaccggcaacggccggtgcaatctgaccaactacaacctctctcccgcccgctatcacggagaggacagcggcttctgcgcccacgcgctgcgtaccttcgatgtgggcgccacgctgcaatattttgcctctcttgggctgctgacggtcagtgaggacagcggccgcgtctaccccatgagcaacatggccggcagtgtgctggacgtgctgcgctacgcgctggagcgccccggcatccgggtctgcaccgggcaggcggtcaccgccgtaaagcgaatagcggagggcttcaccgtcaggaccgaaacggaggtcttcgccgcgcggaaggtcatactggccgccggcggagccgccggcagcaaggtaggcggcgtcatggacggctatcgccttgccaaaatgctggggcaccaccgcaccgtgctgtatccctccctggtgcagctgaggaccgatcccacctatccccgggcgctgaagggcatcaaggccgagtgcggcatcgccatcctccggggcggcgagcgtgtggcggagaaccgcggcgaggtgctgttcactgaatacggcgtcagcggtccggcgatcttcgacatctcccggacggtgtccaccggcggcgaggagctggtctgcgcgctggacttcttccctgactgggagccccgggacgtgctggactggctgcgcctgcggcgggaggccatgggtacccacgaggcctccaccctgctggtaggctcctgccacacccggctggggcagatgctctgcaaagccgccgggttcaccactcagcgcgccgccgacctcaccgacagcgatctggagcgtatcgcccggcagacgaagcgttttgcgctccctatcaccggcacctgcggctttgaccaggcacaggtcacggcgggcggcctgcggacggaggaatttgacccggaaacgctggaaagccgcgtcgtcccggggctgtacgcctgcggcgaggtgctggacgtggacggcgactgcggcggcttcaacctgcaatgggcctggtcatccgggcatctggccgggctgctgctgtaattagttgacaataatatttattatggtaaacctgtaaactgcccgcggcagcttacaggtttactttttcgtcttaataaagtcttaatcctccccctgcttgtttcttaagaggcatttcggtaccatggagccagaaaggaaagaaaggaagtgcccctatggaacccacgctgcggaccatcaatgccgtgatctcggcgctgttttttatctgctacacctatcaatttctctatatcccgctggtgctgctgaaaaagcgccggccccttccccgccctgccgcgtcccatcggtacgcggtgctcatcgctgcgcggaacgaggaaaacgtcattgccgggctgctggactcactggccgcgcagacctacgatatgtccctggtaacggtgttcgtggcggcggacaactgcaccgacagcaccgccgccatcgcgcgggaacatggggcggtggtgtatgagcgcttcaatcacgtgaacgtgggcaagggctatgccctggattttctgctgcagcacatcggcgcagactatccggagggctttgacggctatttcgtgttcgacgcggacaacatcctctcgccggactatctcgagcgcatgaacgagagcttctccgccggaaacgagatcgtgaccagctaccgcaacagcaaaaacttcggcgacaattggatcagcgccgggtatgccctgtggttcctgcgggagagccgctatctgaacggcgcgcgaaaccgtttgggcagcagcgccgccgtgggcggaacgggctttctgttctcgcagcggatactggacgagagccatggctggcggttctatctgctgacggaggacattgagttctccatctaccacatcctccgcggcgaaaagatcgccatctgcgaagacgcggtgctctacgacgagcagcccaccagcttccgccagtccgtccgccagcgtctgcgctgggccaagggctacatacaggtgttccgccgctacggcgcggagctgctgaagggcacagcccggggcagctggagctgcttcgatatgtccatgtccatcctgccggcgtttatcctgacggccctgggcctgctggccaacctgacgctgtcggtgctgggcctgcttcagggggacggcgtgtggttcgccatgcgttccctgctggagtgcatgggcagcatcctggccacgttgctggtgctgggcggcatcaccgtggccagcgagtggcggcgcatccacgcgccggcgtggaagaaggtcgccttcaccttcacgttccccctgttcatgctgacgtatctgcccatctcgctggcggcactgtttatgaaggtggagtggaagcccatccaccacagcgtaaacctggcgtcgctcccctccaccgctgtgaagaattgaccttgtgcaaaggcgggaataggggtatgatagagatataccacacccacaggaggtccctctatgtacacgattttggtcgttgatgatgaaaaggatattgtctccgcgctggagatctatctcaaggccgagggctaccgggtgctgtccgcctgcaacgggaaagaggccctggccgcggcggcgcgggaggacgtgcacctcattctgatggatatcatgatgcccgtcatggacggactgtccgccatggcccagctgcggcagaccagcaacgtacccgtgatcctgctgaccgccaagggcgaggacaccgacaaggtcctggggctgaacgtgggcgcggacgactatatcaccaagcccttcaacccggtggagctgctggcccgggtacgctcacagctgcggcggtatttgcagctgggcggcgggcaggtgcaggccagcacgctcatcatcggcggcatctgcctggatgacaacgccaagaccgtcaccgtagacggcgacccagtggcgctgacacccaaggagtacgacatcctgcggttcctcatgcggaacgcggggacggtgttctcccccaacgagatctaccgccgggtgtgggaggacgtgccgctgaacgccgcgggcgccatcgccgtgcacatccgccacctgcgggaaaagctggagatcaacccctcagagccgcgatatatcaaggtggtctggggaaagggctataagatggagggcggcatctcatgaagggatttttagacaagacgtgggcgaaggccgccgccttcgtgctgacgctggtgttcggcgttctgaccgttctgggcggcgtgggcgtgggtatccttatcagctacgacgtgtttctggacggcggcgacttcctgcgccagacgatgtacgagggaaactgcgtcagatccatcgacatcgccgacagcttcctgcgcggcacgctggccaatgcgggcgtgctggtcagtgacggcacctatgactacagtaccgttgaaaatggagatgtcaccgaggaggagcgggctcaggtgatcagcgacctgccccgtatatttgcggaggagttctcccgcgatgccgccgactgtcacctgaccgtcaccgtcagaggaaatggggaggtcgtcggtacctttgaaaattttgagctgacagacggcgacaagccgctgtacgccacgcaggagacgttcacctatcagctgaacaccggcaacaccgccatggtcaccattgccgccgatctgctgcgcaccgaggaggtgccctcttattcctatctgctggacatgtggctggtggagcataccgccctgacggtgattctgaccgtgctgttcgcggcgctggcactgttcttcttctgcttcctcatggcctctgccggccattgggcgaggcatgagggcatccatctgacgtggctggacaagatccccgcggatgtatggctgatcgtactgctgtgtacgtttttcattggttgggaagcgttctattacgggtggggacgcgttttcttctgcgcggcgctggtgccgctggtgctgctgttcctgtgcgcctttgccgcccagtgcaaggcgggcaccgtcctgcggagcgcgctgatcgcgcggatagcccggttcctctggcgcattgtccgttcgctgtttctggggctgtggcgcatcgccaaaagcctgccgctgatctggaagacagctttggcggggctgatactggtgtttattgaatccgtcctcttcatgcaggactactacggcaccctcgccgcgccgtttctggcactgaagctcgcagaactgctggcggtgctgtatgtagccgtcaatctgcggacgctacagaagggcggcgaaaagctggcgaacggcgacttctcctcgcccatcgacacgaagtacctcatcggcgacttcaagcgctacgggcaggagctgaacgatgtacagtccggcctggagcaggcggtgcaggagcagatgaaggccgagcacctgaagacagagctcatcaccaacgtgtcccacgacatcaagacgccgctgacctctatcgtcaactatgtggatctgttgaaaaaggaggacatcccctccccagaggcccgggagtacatcgccgtgctggaccggcagagccaccggctgaaaaaactcaccgaggatctggtggaagcatccaaggcctcctccggcgccctgaatgtggatttgcagcccacggacgtgaacgtactgttctcccagattcagggggagtatcaggagcggctggccgcctgccagctgacgctggtaacgcagcctcccgcaccgggtaccgtcatccgcgccgacagtcgtttgctgagccgcgtcatggacaacctggtatcgaatatctgcaaatatgccctgcccggcacacgggtctacgtggtttccacgctgtcccggaaggccgttaccatcagcttcaagaacgtctcgcgggacgagctgaatatctcccccgacgagctgatggagcgttttgtgcgcggcgatgcctcgcggcacacagagggcagcggactggggctgtccatcgcccgcagcctggtgcagctgcagggcggccgcttcgacctggccatcgacgccgaccttttccgcgcggatatcaccttcccgctgtcggagagcgcagcaagctaagtgttttatacagatctgaataaggtcgtcatcggcaggcaagcgcccgccgatgacgaccttatttatgtaaaccaaaaattttctcttcccttccacccgcagctgtgctatactgaaaaagtatccgggtatagcgaagttggtatcgcgcttgatttgggaatacatgcggaagctctgaaaaaacttaatatcggggtgttgcgcagttggtagcgcgcctgctttgggagtgccgtggttgtatccgggatggggtgaggcgaaacgccgcaaagccttgcgacgcctgcgtttgcgggattttccccgattgcagaaagcggcacaaaatcgcctttgaccacataaatgaccacagacagaaaaatctttgattttctccctcgccgtggtataatggcagaaattgaatatccgggtatagcgaagttggtatcgcgcctggtttgggagaatacgcccagccggataaaataacttaataaccgggtgtagcgcagttggtagcgcgcctgctttgggagcaggatgccgcaggttcgaatcctgtcactcggaccacctttcccagaaaaaccgcctaaaaaggcggtttttctgcgttataagttcaatttttgaagtgtgcttaaccacatcccaattgtggccagagaggtaaaacggcagtcgcaacctcggtgcgggagaacgccgaagaccgcaaaatccctaacccatccctaactggtgtgttttcgccgttttttacgtgtagttgtgacaatatcttgaaattttcagcgttatgcactataatatctttacggtaggcctttgcgccaccaaggcgaccgtatgggtgtgttcccgtgcggtcttttattttgaccaattagggagagtgatttaatatggcaaagagcgacgctattgcaaaagcaattgcggctgatccctatttgaaaaagcgcaaagccccaactgaagctgagcagcaactgtacctaaaagaggtttctttttcctgtcctctttgtggaaaaatccttcgacacaataaacaaggaaaggcaaataagttatatgagattgcccatatttttccgaatagtccgactgaagaacagtatgaacttttaagtaaactgcctcgtttgggggataattccgagtcctttgaaaacaagatcgcattatgtaaagattgtcacaatcagcaggactaccacaccacggtggaggactacctaaaactcctgaagataaagcaacattttctacagcttacagacctccacgaagctacactgacaatggggctggaaccgcaaattgcagatgttgtggcaaaagtttgttttttgcgtgaagacgaagccgccacgctgagctacatacccgcccgattaaccaaaaaattctccacaaatgagttcctcttgaaaaaccgggtcagcatgaatgtgaccagctactatccttacatccgtgaccgctttaaagaactggaggggattaacggttttcgtttggatgcgctcagccttcagattaaaagttgctttattaaaatggagggtctctcagataacaagagtgacatatttgaccaactcgtaaattgggtaatggcaaaaacgtgctctacatccagagaggcttgtgaggcagttgtctccttctttgttcagaactgtgaggtgttccatgagattaccgagtaaaatcacatcttatggtgaaagtgtaatcagtaagttcccgccagtgctctcggtattgcaagatgctgacacgggagtgttagctctgtatgatgctaccacgaagcatttcagtagtattgaggatttcatggatactctggactgcctgtttgctctccaaagaattagatatgacgcagaacgcgaggtgctctgttatgttgcatgagatttactgtgaacaatttcaccagaagcgaattgttttcaatcctggacttagtgtggtgttgggtaccaatgcaggcgacaactctatcgggaaatccaccttcctactgataattgactatgttttcggtggtagcacatatgcaggtacaacggacatcatcgaaaatgtcggttcccacgatatatacttctcttttatttttggcgaagaaatctttaagttttgcagaaacagcattaatgcccatactgtttggaaatgcaatgattcttacgagaaggttgaagaaatcgggctgaatgattactgcaaatggctggactcgaagtatgcaatatctttgccagaactgtctttccgagatgcagttggtcgatatattcgagtatatgggaaaaacaattgcgatgagcggcatccgctgcactaccaggctacagagaaagcagaaaaggcatgcacggcgcttctgaaacttttcgatgcgtatacacctctcaaggaaacagaggccgcagcccagcgctctgatgcggaattgactgcatataaaaaggcgcaagctttgcagtttattgcaaaaatcaccaagcgtgtacacgacaaaaacgaaaaagagattcgcagtattgctgcgcaaattgaggagctttcttctggattggaacgcggtttacttgatgtagatgctgcagcatctgaacaggcggtttatatcaagaaattactatccagagctcggcgcgcaaggagcaaagtgaaagcccgatgggatttgcttgacgaaaatggcaactatgccttttcctctacaaccgattccttcgctgatttacagcactttttcccagaagcggccgttgcacacttggatgagattgaggggttccacagaacgatttcctccgtgttcaaggctgaactgagatcagaccgttctaagcttgaaaaagaactggctgagtatgaccagatcatccacgaatacgaagctcagcttcaggaactggttcaaaaccccaacctttctaaggttgttctaactcgtcacgcagaactgcttcgcgagaaagaccggatgcaaaaggaaaatgatgcttacgaaaaactacagcagctgaaagaggaccgagatgctgacgcggagcggctgaaaacaattaagcaacagcaattagctttagtttcctaccggctcaacgaagaaatgagccgactcaacgatgctatctacgagggatcctacaacgctcccatactgaactttaccgacaccggatatgatttcttcactccggatgatactggcactggcattgcatataagggacttgttgtatatgatctcgctgtgctgagccttacaaaactgccgcttctggtacatgactcggtcgtactgaaacagatttcagatgatgcgattgagaaaattattgagctgtattcctcttgcggtaaacaagtcatcatcgctctggataaacaggattcgtatagcgaaaagacatctcgccttctcggggaatctgccgtattgagattaagcagtaacggtcaagagttgttcggacgttcttggggataaactgtttgcaacttttatgggctcgccatttctggcgagcccattttcttttatcccactctctcgaacggtatcaccttgcaccggctttcctccggtgggtcgggaggttccggggtgttggctgccgtgaccgactccatgaagccgccgatcttctcagccgcacctcgctgcatatcgttggtgatgtgcgtgtaggtgtccagagtgaacccagcgctgtaatggcccagcatgctggacagggtcttcacgtccacgccgctggagatcgccatggtggcgaatgtgtgtctgaggtcgtgaaagcgcacgtgctcctcgatgcctgcgtttttcagcagcttccggttgatccgcgacacggcgtccggactccagtagccgcctgtgcggggcgacgggaacaggatggggttgtccgggtgctgttcatgctcctgcaccagcaggtcgaccgcctgctgcgacagcgccaccttgcggacggagttcttcgttttcggctccgtcacatccagctcgccttccatgcgggtgacctgcttgttcaccgtcaggatgcgctccttcacattcaagtcctcccactggagcgccagcagttctccccggcgcagaccgctggacagttccagatagaacatgggcaggacaccgtacttctccgcttcctggaggtacctgccgatcttctccggcgggaggatggtcatctctttcttgtccttgggtgggatgcggcagttctcgcagggattgtacgggatgagccgctctttcaccgcctgcttcagcgccgcctgcagcaccgcatggacacgccgcacgaaggtgttggacaggggcttgtcgttctgcttcgacccacggggcatcctgccgttttctttcaggtcgttatacattcgctggatgtggatggacgagagctgcttgagtttgatcgcgccgatggccgggatgatgtggtgctcgatgatcccctcatagcccttggcggtgttgtagcggatgttgggcttgctgtaggtttcaaaccacaggcggcaccactccgctgcggtgtagtcgcccgtgtgattgagcggcgcgccgcgattctcccgaatggctttcgccagcttttccttgcactccgcctgggtcttggcagacacgcttttctggatggctcggccggtgaccgggtcgatgccctgggtgtatctgccctcccagcggccgctgggcttttttcggatgctgccctcgccgttggctcgtttcttggccatttatgatccctcctttttaacacaaacacataccacagagtttttggaatagctactaaaatatttcagattttttcgtggcctgttcgtcgatccattccatgaatttatcacggggaacgatgatgcggctgcccagggtgatggtggggaaatccctgcggtgggccacctcataggcgtgggccagaccgatgcccagcacatgggacacatcctccacggtcagcatcagcgggagttcatcaaaagagttgtatttggattttctcattcagttcctttctaccctccgcgcggaaaggttttagttctttgttttgcggcgcagtttttgcgccgcttacatggtcatgtcgggccactgctcctcatggtcatccggcttgtggcccagggcgatgcgcttctcctgcagctttttcagccgcttccggtcgatctggattcctccggggcgggacttgggtacggagttgtcccggaacacccagctcatgtgatggagcagccgagtcaccgccagcattgcagagggcggacggttttcctccaagtggttcaggagatactgtgcatactggttgtcctgctcggcggatcgggtcagccagtggacggcccgctcctcatcgcagggagcttccttgccggtgaggtacagcttgcccagcatgtactgggcgtagggatttcctccctccgccgacttggtgaaccactccaacgcgctggcggtattctttttgatatgctcgcctttgagacactctttggccagccgatacatggcgcagctgctgccgttgaccgcggcggtgtagatccaattcaaccccaaacggatattccgtacctccacatcatcggagaggtacagcttggccagagagtactgcgccgccagatggccctgctccgccgcctgctcgaaccagtaccgggcgttcaccgagtccggtatcagcagagaaccgtcccgccagagctttcccatcagatactgggcatacatatcaccgttctctgccagtttgtccatttcagagacggcgtcgctccgttcctccatggtcaggtgctcgtcccggatgatgtcccgcagcgcccagtagtcgtaggaggcgttgcggtattcctccggctcgtcctgctgattgaggcccttctcctcgaagccgatctcacccaagtgcaggcgctccgcctcctgaatgacagcgttcttgatctgccggaactccttttgctgtgagagcgggatgcgctcctggggcttgtcgtgatagtagctgtccaccttcccttggagcatcatccatttttcatagcacttgctcacgacagggagccgttccatctcgtccacgatctcatccaccagattctttaaccgcttgggaagatagccataggacttttttcccttgaccgctccgagctgcgccgccagctccagcatgagccgctcggcatccgggtggtcgcacatactatcccgcatggtctgcaccagctccagcattgcccgccgcgcctcccgcaccagctcatctctggactcagacttctgttcatagagatggagcatttcgttgcggaagatatcattggtcagcttggacttgatctgacggatgccctccttggacagataggcctgtcccgcttttgcggaccatgccatcatgtggatgtgcggatgctctccctcgtcgtggaaggcagcgtaccatcggaagtcgccgggtgggatcttcattgccgccgcgatgtcgttgcggtgggcgcggatgagatttctccacgctgcggcgttgtcgaagccgagccgggcagcatcctcacgcttgagggagatgatgtgcgtccacacgtttccggtgtagctctccaactcctccatggccttctccagcgaaacggcgtcgtcatcaccgaacaggccgtgagtaccgttgcgctcagcacgaggccgggtggcgatgtacttcatgtactgctctgactcgtggatggcatcccagttggattccagcgccagcgtgatgaacgcagaggcgttgaccttggtgggcttcgtcaggtagtcctcgtactcgtagagcgttttgctgtccgggaagtctttgaccagtttggcgatgagctgctcctgctttcgggtgggcggacggtcatccgggataagctccacccgctcccgggtcgcgatgtagcgaaggtatccggaggccccgccggtgcttttgatatagggactcttgaggatcagtcttgccattcgtcatcatcccagtccggctcctgacgggagcgcgcatacttctccagagagatggtaccgtttgtggcctttacattccggacactctgcgcgcgtatgcgctttaagtcatcccggtccatctcgaacgcttcggcgatgataccgttggtcatgtcctgctccacgcatctggtaaaatctctgcgggcaatatagtcctccagtctgctcagcctgccgtcgatggcagacatgattgccatggacagcagcgttgtgttgtcctgtattcccagatagtccacatagaagttcacggctttctcgatgaactcatttttgctctggcagttgtcggcggcgtaccactgctcgatccttcttctggtttccggctgcatccggaatgcaatacgatctctggtttctttactcattcaattcctcctttttgctgtaagacatccttgaaaagccctgcaacacggggcttttcggggaagctgacgccatcggtgcttattttgcctcgcaaagacgccagcttcaagctcccgaaactgcccgcactgcgggcagaagtgacggctgcggcggtgtgtgcgacgccatgcctttatcctgctttttctttcgtcctgcaaaagcctgccgaaaatggctcacatccggcttcaatcctctggctgggactgggactcgcttcctcccggaaaggcgcacacaaggcgttctggcggccctgggcgttggacttttcgaggagctgcgccgcacgatagcgggcggcagcctcctctgcctgccggaactgccgctcatagaatgcttcgagtacaccttggatagggcgaacggtgtagagcagatttccattcaggggtctgccatctttgcttcgtaccatcgtcggctccgtgtagatgagacctttctcctccagctgccgcacatactttgccaccgtattttcactcatgccgatcgcatggccgatggttttgtaactggggtagcactggtaggtcttacgattctcgcaccggagcagataggtgtagagggagatctcccggtaatccagaccgatgctgaatatctcgttgggcaccataaaatagtttttctctgcgctgcgcttgggccatttcttgtaactcaattcatacctcctgtgttgttgtagagtccgatgacgctcacacagggaacagaaaaaatatcattgcttttctgctgtttgcctgatatacttttatcagtagatttgtgcgtgcctgtgtgtgcgccgagccgccggactgttgccgcagtcacggcggtttttgttttgcggtcgtactggtgtgcatccctcctctgctttgcagctgagtcttttactttcatctgtgagctatctttttcgcctcctccgtgttaaaatgatttatatagccgtgcgttggaaacggcacatagcaaaagaccgtgctcccgggagcacggccagagatggaatgaccttccgagcggatcgccgtatggcagagagcgcacatgctctcatggggtgctctgtcaaaggccatgtgggttcgtcggcgcggagaccgtgccgtaccgaaccaggggcaacctcacccgggtgaaattgtccttctactattacttagagaaaaatcgcaaaatcggaaggtctggaattgtaaactttttgtgaatgcagaaagggtggtgagttcatgtccttcaaggatacccaatcttataaagagcttcaggcagattggcgctggatacacgaaatggacccggaagctgccgccgctgcagaccagtgggtgaaggagcatccggaggagtggaaggagctggagcacatgctctactacagtgaggccaacttccacaagcgagttgcgccggacactctggaagatgtggatatcaaacagcccagatcttacaatccggaagcgttcctgccggaggaagtgcgcaacgcgatctacgatgatatgcgctggtttgaccgggcgaagtatctgccagagggatctgatgaagacccgctcatgtatgtgcgcaaagaaattgacgagggactgcgtgagctgactgaactacagcgggaggttctgttccgcaccgtcatcaacggcgagtccaccgagtccgtcgcacaggacaaacagtgctcgtccagaaacatccgagatatccgcgcccgtgcgcttcgacagatacgggccaaaatcaagagacgtgaaggctacggcaggcccgacgttgtcatcattattttgctgtttatgctgcttgttggtgttccgcttgcttgctggggagaacagctttggaccgcatatccctggctggagcccgtggctgcagtgcttagcgcattggttgtggctgtcatgttccaaagttcccttcgcagagaagcagaaaggctgctgcgccagcactgggccagcctgaatgggtcgcagagaaaagaatgactatgaaagagggagtgaagcacttgcggtgcttcactccctctaactatgctttttactcagtcagttgaagctgcatcaggattctcgtaaggtttaccatccttgttataggtcaaattaaatacaagatcagacagccatttcttaaacgaaggattatcctggaactgcttaaacaattccatattgtccgccataattgaaaagatgacctgttgcaacgcacgttcgctttccaagcgcgcactctgctcatcagagtttctcatggcattctgatatttttcgtccttagagaccatggccggtatctcaaggatctgccgccgcacgttatccgcatcattccaattgatgttaccaaacatatcattgaaattggagagaatgacagacaacaaatccatttccggttcaacgatatgcccaacctttcccgccggtacgggagccacctccgtatcggcatcttccaggcgaatggacatgacctcacgcgcttcgttgcggtaactttcgaggtcgatcttttcaagaatcccctgcgaaagatcgtcctctcgtggagatggcagctttggtatcagcaaattaagaaagatggacaaccgttcccagtctgcgttaccatatggcaaaatcgctccgagaaagccataggtacgcacaaacgcctttgctgcgctcttaaatttaatctggtcatccgtgtcaagctgcttgtaaacggcagtgcaggcatctaatgtgggatcaagtttgtcgcgatccgctccatccaggtacaaattgacaagccgctcgacatcttcgttggagaacacctggtatccctccattgttgcaaccaggtcgtatagcttattcggatcggtttcgccggacaaaatcgtggtgcggtaatatcgcgaaaatgattcctgaatcatctccggcttgtttgcaaagtccaagacgaaagtatcatacttcttcggacagcagcggttcaagcgagagagcgtctgtaccgccttgatgtcataaagcaccttgtccacatacatggtgtggagcagcggttcatcaaagcctgtctggaacatatccgcaacaatgagaatgcgatacgggtcttttttgaactccttcggtatcttagcgtccgggaaaccgttcaatccggcagaggtaagcggcggttcctgaccttgatacttgttctcgccggaaaaggcgataatcgttttatatggactgcgcctgtccgcaaggcatttgttgatggcgtaataatattcgatacagcggggaatgcgggaggtcacgatcatagcacgagcctgcccgccgatttttcctttggcaatgacctgttcgtggaagtggtctaccatcatagccgctttcttggcgatggtatagctgtcactttccacaaagctgcgtagcttcttctgcgcccgcttcttatcgaacatcgggtcatcctcgacggttttcattaacttatagaagctgtcaatgggcgtgtagtattgcagcacatccagaatgaatccttcctggatcgcctgcttcattgtataaacgtggaaaggtctgtgtttaacatcgtcaccgtcctgatatggaacgccgaatgtttccaacgttttattcttcggggttgcggtaaacgcaaagtagctggcattgttcagcagtttgcgcccttccatcatggcgttgattttatcctcgttgtccatttcgtcatcggaagcaagtccggaaagcgcaaggttcatctgcgcagagtttcttccgctctgtccggaatgagcttcatcgatgatgatggcgaaatggttatccttgtgttctgctccaatttgcggaacaatgtacgggaacttctcaatcgtggtcacgataatacgctttccatcggtaatggctttcgtaagatcgccggagtgctccgcccatgcaaccgtgctgccgacctgcataaactgcttgatcgtatcccgaatttgcttatcgaggatacggcggtcagtgactacgataacggaatccaatatcggacggccgtcctgctcaagtccgataagctggtgagcaagccaagcgatagagttggatttaccgctgcctgcgctgtgctgaataaggtacttttttccgacaccatttgttttcacatcggcaagcagcttcgttacaacatcgagctgatggtagcgggggaaaatctgcttttcctttttctttttggtgtcctcgtccacctcgacgacgacctgcgcgtagttttctatgatcagcgtcagcttttccttggtgagaatatccttccaaagataatccgtcatgatgccattgggatttggtggatttcctgcaccatcattatatcccttgtcaaagggcagaaaccagctgtcttgtccggcaagtttcgtgcagaacttgacacgggcatcgtctacggcaaaatgcaccatgcagcgcttgaactgaaaaagcatctcgcgcgggtcacggtcatccttgtactgctgaacggcatcatcaacattttgctttgtgatctgattctttagttcaaatgtaataaccgggaggccattgataaatacgcacagatccagtgccagtttggctgcatcctgtgaatagcggagttgtcgggtgacgctgaaaatattcttttggaacagctctttagcttttgcgttgccctcagatggagtcaggtaaaacatgatcaggtcggcggggtatactttgatgccgtttcgcagcacgtcaactatgccgcgcttagaaatctcgccctgtaaacggttgagaaactgtgcgtatttttgatgacttttccggatgcccagcttctctaattgctccggttgcgtatcctgcaggaaccgaaaaagccgagtctcgtcaatggcgtattctttgttgtagtcggtgttgaagccttcttcatatccgttgtgctcaacaagccagtttacaatgagaacttcgaatccgctttccttggtattggtcggcattacgcttcctcctcttctgctaaatgaggcatctcatataagttgcccaatagctgttttataaatacaataaccttatcggcatcttcttgggttgccattcccatttcgtgcgtatacttgtttcctatctttcttattttatcgacccatgctttgttttggctaccgatatagccattcacttccaaaaaatctatgtattcgacgaagcgttttcccacatcagcgcccttgtcaaccgcaatatacattaacaatgttcgtgaaaccattataaccgagtgataacactcatttagaaagcactttctgcattcgttatacagcttttctacattgggcggtagaaagcgtacatcttcatagggcagcagctgtgactgcggtatgatttttccgtcaagaccaatgatgaccggcatgaagcactccgggcatttgtgaatttgatatttaatggcaccggtagctgtatcgacaattctggtggtagaacccgcctgtacccgcacgccgcagtatggacaggttattgtttttgcagtcatctcttttttgggaatggccttccaagtccattcttttatctctatcatacttattcctcctcaggaggctcgtccgcaccttgttccaaattttcatctacattatcgttatcttcatccacaaattcgtattcggggatttcaatgctacggacatcgattttgcctgtcacaacatcggaaataagacgcgtacgtagctcatgaagcaaacttgtacatctattaagttcttctgtggctttatcgtactcctttctcagtatgttgattttctctaacgtgcgtacaggtggaattggcaatgggcagtctcgaaagtctttataaccaattttctttccatcccttatatcattaacgcaggaattcaagtattgaataaacggctttgatttaaacagaaaaccgtaatactcttcaatacgtgaatacgacggattgagttccataaccgtgtaggccgcggaaacaagacctttgattcttgagtgctcaatgccaccttgaaatgaccttaagctaataatgaaatcaccagggtaaacaagtttttgactctcaaaattgcttggctgtacataatgactgtcgcagtctttcttaaaaacgactcccttatcttgagtaacggccaaaagctcatcttccgtatgacctttctctatgcgttcactgaaaatgcatcttgctttaatggacttccagtgttctggaaaagcagcttcaattcttcctatagaagattgagaaacatcatcggagaacaaatgcagttgaattagatcaaatatgagggcgcgacgttgtttctttatcgcaatcagcctattgatgcccgaaaccttccagtccagaaagcgcacaatctgatcctgctcctcgcggggcgggacaggaacttttgtgctttggaatgtgttaatgtttattgtttttctaagcccagtatacagtggtcttagcatcttaccgttgtctaaggcaagatagtaataatagatgaatcgggcgttaatgttgctaacgcgcataattgtgtatgcgccagtaagcattccattgtaaccagacagaccaactgtgcgtggcgtttcgtcaatatcaaaaaggcaaaatgccatatccccgttttttacgattttgtatttgtcaaatgactcagggaatttaccccctccatccatgtcacggggaataataccattgagcgtcaatgagagtagtgtgtaatctgctgacctttcgccaacaatctctttctgctccgtgaatatatttttgtttcttcgtatctcccaatgagccggaacagctttcaaccacggaagatttgcttcacgatattccgcatatccgctcattgcacaccctccatgatacccgccagcaacccgtccgcttcctgctccaactcttttagacttttcaaaatctcatccatggggcgcagctccacgggcttgtagaaatacttcgtaaagctgatttcatagccgacctgcgttttcttctcgtccacccaagcgtccggtgcataggtcagcacctcgtttttcataaaggcatcaatgccgccctcataggggaacggaatgttctccgtgtcgcgcaggtcaacatccggttcaccctcgattggctgcgcggccgggtctttctccgtgataaaggggcgtacctttttcaatgcggcggctttcagcttggtagccttggcaaaagcggtccaatcatccaacggtgcggttttcgcagctttttcaatagctacgatcacgctgtcgtattcatccgacttcttgaatgtatccgccggaattgctctgtcaggatacacgcgcaaacgcagcggccgctccaccgtcacattccaataaccgaagtcctcgttgttcaaaattatgctgacttcgctttcctccattgcaaggaacatgcgaacgatctccttgcggatttcttcggtaaattcgcagttcttcttgcccatgttcttacgcagcgccgacttcatcgccgttgcgtcgatgagctgaatcttgcccttgcggcgttcttctttcttattggaaagcacccaaatgaatgtgccgatgcccgtattgtagaacatattctccggcacggcgataatggcctccaccagatcgttctcaatcatatagcggcgggcgttgctttcgccgcttcccgcatcgcccgtgaagatggacgaaccgttatgcacctccgcaatgcggctgccgaggggcgtgtctttcttcatctttgccacgttattcaacagaaacagaagctgaccgtcgcttgtgcgcggaatcatcgtgagctgctccccgccgtccagataagcgttgaaacggctgtcgaggatttcctttttgccgcccatcttttcggcatcggttttccagctcttgccataaggcggatttgagagcatgaagtcaaactgccgggtggcgttgccgtccaaggacagcgttgagccgtaactgatatgttctgcctggtcgccgtcacccttgagtaacatatccgctttgcagatggcataggtttccgggttgatctcctgcccaaaaaggtggatagaaacatttttgccgcgccgtgtcgccagtgtcataagccgatcctgtgcaacggtgagcataccacccgttccgcaggccccatcatagcaggagtaagtagcgtccttgatctgatccgcaatcggcataaagataaggtctgccatcagctcaacaacatcacggggcgtccagtgttcgccggcttcctcgttgttctcctcgttgaacttacggatcagttcctcgaaaatcgtacccatgccgtggttgtccagaccgggatgcttgagaatggtcttttcttcatctttgtacaccgggttcggactgaggttaatatccgaagatataaatttttcaataactgcgccgagaatgtctgcctcgatcatggtatcgatctgattacggaacttgaacttctccaggatctcctgcacattcggagagaagccgtcaagatatgcttcaaaatccgtttttaaggtctgctttttcgcacggctggtaaggtcacgtagacggaacggcgacgcattgcaaaaagcctgccctgccacattgcatagcgcaggccactggttatcgatacctgccgcatccaactttttcttcatatccaggacagactctttactgtcctccaaaagagcatccaaacgccggatgaccgtcatcggcaggatcacatcacggtacttgccgcgcacataaacatcacgcaggcagtcgtctgcgatactccatataaaactaactatttgattatgcacctgattgtccatatttcttcgtttcctttctcgctgtaataaggcaccaatgatcatatcctgaatggtatcttactaaagtttctacccgttattctggactattaagatttcagcttataagttctgtttcgatttccgccttcggctacgacaatttcctccgcagtcagttcagagaggagtttcttggctcgtgtacttttgactccaaggagctctgcaatatcggcacttctggccgaaatatgatcagtaaggtatgcaatgatttcttctttctgccgggcagattttatcgttgcttttttatcgtcactctttatcgccgcttttttatcgtcactcttggagaataagagcgttaatgttgtccgctccggctcgagttgctctgtaatctccggagttgtccaattttgctcgcgccagacgcggaagatattcggaatgccgctaccagcacgctcaccaatatcaatcaggttgaacatcttcagcatcgctccattacgcggatcagaaacaccgccgctctttgcggcatcaatttcgatgcggaagctgcccggattagacatcgtaatgctattacgctttttgacgatgaccaacccctgtctgccataatagtcagcatgaaccaggcagttcgccaacgcttcacgcagagctttatgcacatcggtatcgtccactctggtgccaccctccatcttaaagggaaccttgatatcctgaatcagcttgttgtagacccggaaatagaagtcatacacattgccgctccagtcgccggaagaagatatgatacggtcagtccaacgggtatcagcgtcatactgttcctgatagtccagaaagtaagcgttgaattctcgcacaatatcgtattcgttgccgaacatgagaagtccggcagaagtgggatgcttctttccattagagccgatgcccacagcacccagcttcaggagaaaatcttcgtcctccagcgcttcccacacatggccggggcgggagaggcgcattctctggcgatagctgcggatgctttctctgttgaacaccgtcaagtccatttcattcaggatgagcatgtcttgggttttcacggaagcatcccgcaccatggcctgatattcctccttggtgcagcgatagtcgccctcaccgttgcggcggtaggtgcagagcggattgccgtccacatacaccggtttataggagcgttccgcgcggggaacattgatgaccacaatgtggtcgccatccacctcttggacaaatacatccttggaggacaggacattcacgctggtcttattggggttattgacgatatcccagaactccttaatgagtctgtcagggtcgggcagatctaccgtgtgcagggatttatccgcccattcttccacgcccaacaggataatgccgccgtgggtattggcgaaggcagagtaggtttcccaaatgcttttgggcagaccgccaagggctttctttgcctcaatacggttgttctcccgatactgctcgattttggaaaagtcaatcatggttttcctcctttacgagctctatgatatcgcagaagtcgcaatccagtacggtgcagattttcgtcagaatctctgtactgacatgctggttcttgcccagcttggcaagggcggtcgtagacatgccggtagccagacgcagatccttctttttcatgtttttatcaatcaggagtttccacagcttattataacaaatcgtcatcgtaacacctcgtgtcagagtatacactaatacaggttaattctaacacagcagcttcagtttgtctattgaaaatccaattttcagattcgtgatgtcctttccagacgagagattttgaattataaactggcaaatggtaaccgcaggaatgctttttttgctcccctgcggttatttcattgtttatgcggcgcaatttttgaggtcagcccatggtgccaattttgttgccgttctcgtacatatcctcggcatactcgacatgattggggccttcgctttgtatccagccaaagccggggacatagaccatatccgccagttcattatcgttagctattggctccggtgccgatttaggttcaggttgcgtgggctgtaccgggatggaatctgtctgcgtaagaggtacatattcttgttctgtctcggcttcatcttctatttccggtacagggatgggcaactcctcggtggctacttccggggctgattcagcttccggcattttcgattctttcttttctgttaccactggcagcaccggtttctctgcttccggaagtgtcggccgtggagtggtcacggcggtcgtttcgctcggcgcgggtgttttctcgaccgtttcggcctgcggccacacggcggcacacagggcgagacaggcggtaatcgccgcggtaaccgcggtaacgatgattctctttttcattttggttcctcctctttggatgtaaaatgattgagttctgtggacaactcaccttttgcggaatagatatcagaaattcagaagattatccagagcatttgccgcctgctgaagctcgccctgagtggcttcgtttggtatatcttcatccttttgcaccttgtgcggcagataaggttcatagttctgccgggttatcgatggccggtaatgtcccaacatccgcgccagttccttggtttccatgccgttccgcagagatagaacggcgcaggtgtgccggagatctgtgaatcggatatggtcaagccccgcttccttgatgatctcgttatgcatccggcgtaccatctgcggcgagtagggcctctgcgttgctggatgcatgaacatcagcggactttttggatgcttggtgtgttccatgatcaggaggtcgatcacctccgatgtcaaggttattgttctcgtttccgagccatattcgatcagttcccgccgttctacagagcgctgctctgatatggtcagcgtcctgttttttacattgaggtcattccatttcagggcgatgagctcaccctgccgcaggccagccgttaaggccagcatgaacatggggagatgccccagccgttctgccgcatccagataatcctccatctccagcggcgtcagcacatcggcattgaccttctttggcttggagtagtggaacgctctggcgggattatcgccaatcaggccatcccgcatggcttggtccaggcattgctgaagcaggcggtggatgtgccgcatggtttcttctcccaagccagagctgccggttcgatgattgccgaagcgcttccgttcctccagaaattctccaaccatctccgatgtcaattcagagagcggtatatcacccaaaccggggagaatatggttcttgaatacatagttgtgtgccgcataggtagtcggcctgctctgatgcttgtcataggtttcctgccagaagctgatgtattcctgaagtgtcatattcccacctccatgcactggcgctgcagatcccgaaaggccacccacgggagcctggcctgtttcaggatcttcttgtgtaagtagtagaactcgtggagcttgtagggtactccggtcttagggttctggaacacatatgatgaactggtttctgatatccgcgtcaggagatacgccgctttctcattgagcgtcagcaaccgctggcctttgaggatgtacctgcagcggatatgaaaatcggcccacgacaaggtgatcagttcacattgccgcaggccgcttgatagtcctgtatagatgacgggaagtacgccgagctgctccgctgcgttcaggtaacgctggagctgccccaatcgcaaaggggctgttttgtattcctctgccttgggctcctggcagagccgcaccgggttgtagggaataagctggtcctgtgccgcttcgtccatgcaccgccgcagaagcaggtggacgcaccagacgcttctggcgctgagtccctgactccgtagcgtctcatagaaatcggtgatggtctgctctgtcaggtcagagagcgccacacttccgatgccggggatgatgtggctgtagatcagattgcggtacccgccctcggtgttgctattccatttgtggcggttagcggtgaaccagtggtcgcaccattgcccgaccgtgagattattttctttctgcatatcatcgcctcctttttggcaaacgaacaatatcacagaaagcaggaaatagctatcggaaaggacagaatatttgcaggaaaactactattccgaataacgcctctattgttcggaataatatagttgattttattcggagcagcgattataatattcttgacaaactgcaatggaggtgttccaatatgacgatcaaagaagcggctgccgcttgggggatcaccgaacggcgggtcaatgcgctttgcaaagccggacgcatttccggcgcgtataaggagggcaggcagtggtttatcccggacagcgctcaaaagccgatggataagcgtggtcatcggagtgaggtaaagcccgcagcatcatctgcgcgcaagccgttgcctattggcgtatctgattaccgggacgcctgcaaaaactactactatgtagacaagaccttaatgatcaaagagtttctggacgagcgccccaaggtatccctgttcacccgtccgagacgttttggcaagacgcttaacatggatatgctccgcactttctttgaaaagacgaccgaggacacttccgtttacttcagagataagaaaatctggtcatgcggagaatcctatcttgcccaccatagaaagtaccctgtgatcttcctgtcctttaaggatgttaaatacacctcttgggaagaaacctatcagacgctccaaaagctgatcgcgcaggaattccgccgccacgacgagttggcagccagttccgcacttagtgattacgaaaaagaggaatattcccttcttgcaacagaagccgctgacgaagtggaatatcaaatgtccctgcggacactgacgctgctcctccataagcaccacgatgtcgcacctatcgtcatcattgacgaatatgacactcccattcagcagggccatgtgagcggcttctacgacacgatcatcgggttcatgcgaaacctgttctccggtggtctgaaagacaatccgcatctgagctatggtttcctgaccggcatcctgcgtgttgccaaggaaagtatcttcagtggcctgaacaatctgaagatcaactcgattttagacgagcgctacagtaaatatttcggcttcacttcaagcgaagtacacgagatggcagactactatcatgcttctgataaatatcaggagctttgcgagtggtatgatggttaccttttcggcaataccgagatttttaatccctggtctgtcattggatacttcaataataactgccgtcccaaagcattctggcagtccaccggaagcaatgacatcatccgtgaggtgctggcttctgcaacgccggatattatggagcgtctggagctgttgatgaagggcgaatccttcgttacgcacattgacaccggcgtcatttatccgcagatccagaatgatccgtcctctgtttacagcttcctgctggtggcaggttatttgaaggctgtgagctgcgaccagtcttacggcgaggattatatgtgcgaagtggctctgcccaacaaagagatttctttcgtctacagcaaggagatcctctctcagcttgagaatattattcctcgttccgttgctgttgctattcaggaagctatctacaaggtagatagcgactcactgcaaaaaaccttggagaagtttctgctccaaacaataagtttccacgatgctgccgacgaaacattttaccatggtctgatattgggtatgtgcgctgtgatggacaacagctatcgcattacctccaatcgcgaagctggtgatggacgatttgatattcagatgcttcctttgaataagcggctgcctggtattctgattgaattaaaggccgggaaagaccgctctgaaacacagcttgaagaccttgctaatgttgccttgcaacagattaacgaccgtgcatacagcgttgatttgcaggcaatgaatgttacatcaattataaaaatcggcattgcattctctggtaaaagaacacgcattgctgctgaaaggcaaaacatcgaataaacatcttcgctcagcaggctggctatcatccaagtcagcctgctgtttctttgtcatcgcgcttatttctttgtttatgcggcgcagtttctgagctgctctctgcggcaaaaagcacctgctgttggaggtaaacccggtcggaagcacttttaatatacagaattcaatcccacacaaatcccaaaagacgaaagcggtgtctgaaatgaacagggcaaaagagttccaaagaggaaccgcaggagtgccggaaagcgccaaagagggcgcaacaggtcttgctgaaggttcagacataggtttgggtccaggagaccgtgcgttcgagccgcactactcggaccaaaatccctctgaaatcaacgatttcagagggatttttcttattctttgtctattgcggcgcaggatttgagggcaattatataacgtgatgtcttattgcaattctcgctaaattgtattataattgattaacggtaggcctctgcgccgccaaggcagccgtgtggaactttcccatacggctttattaattatagggggctcttaagtgataagaaatacattcccccaaattggagatatagtctatctaatacatcgagcagcaattattgaggatatcttagtcggttttgatattgtgaaagttcgctatttgcacaattttgatgaattttacaccgatgtttccgctatttccttgatgcctaatattgaaataaatactttagacattaacctttttgtggaggtctaattatatgggcaaaattctgaacttaattgaaggaaatatgaacggagacgcttgggaggatctctgcgtacgctgctatcgaatgaagtatcaagagcaacattatgtagcgattcctgccgtccataagggcgatgctgggatcgaaggatatacaaagagcggcattgtacaccaatgttattgccctgaacgtagttactcggataacgaattgtatgaccaccagcgagataaattatcagcagatataaaaaaattgatggaaaatggctcacgtatgaaatcgcttggaattccgcccattcacgagtggcatttcaacatacccgaatataaagactcgagaattcttatgcatgcaacaacaaaacaagcagaagtgctatccgagaggtcaaaaaagccaagcatttatagccatatagcagacgattttcaaatcataataaaaatcgcagaagatctggcacctgaaattagcaatatcatccgaacaacaataacaaataacaggataaatttagcagttcagcacacttcttcccctgattggacaaaatgtgattccgcaaaagttgaaaacatccgcagaaagattaaagccgtaatgcacattgatgatactgcagatccagcattgaatcgggtaattggcctatatgttgattattacatcagtggaatggaaaatatgtccaatctgcgaattggtttccctgagatttatgaagacctgtacaggcttgagcaaagtttcaaaaacgaagtatccattagaacattaatgaatactgatcacttaatgaatcaatctgtattttccaccatattatctgacttcggggagaagttggaaaaggacttttcaacaatttttaaccaagcatcaatagcagaggtcaagcaggacttaattgccagctggcttgcggactgttcaatggaatttaggagtatgtgataatggtagatgatagcttaattaaaggagatattgtatttaacgcaaaaccagatgctgttccatacaactatcgaataagttataaagtgtctcaactctgtctaattatgcggatatgtggctggggtgattcttgttctctgattaaattacagatgatctcatacgcgctcttctcatcggaaacaatgagccaccttattaattatgcagaaggttatggccctgctcctattgtgcgctttgatccagcagtcaataaagcattaacatttgccatagcatacggctttgtttctcaacagcgaaatggaaattataagctaactactaaaggccataatttggccgaaagaatcaaaattgttggtgacttaatgacgagcgaattaaccagtttaggagatctttccaaaaaactaacagaaggaaaaatcaaagaattggccgacttatggaggactaacaatgcttcgaattaatcgtctacgggttgaaattaataccgtcaacggagtatacggaattgatacctctttctcctccggtctaaacttcattgcaagtgaagataatacttgcgggaaaagctccatccttgctgcaatatactattgtttaggattggaacaaatcataggtggcactggcggtattgggagcaaagtgctaacatccgtatttaaatccgaaatcgaagataatcaaaattcttatagagtattagaatctggtgcgtatttggaaatctctaacggatacgatactgtaactatctatagaaatattgtttcagaaagtaaagataaccgtttagtaagcgtctactacagcacttatgatgctataaaggatcaaaaaactcaggtatctgacttttatgtcaatattcaaaatgcggctaccagcgaaaaaggatttcataactttttagaagaattcttacatatttctcttcccatggtcggaacatcggatggaaatgagaggaagctatacttacaaattatcttttcagctatgtttatcgaacaaaaacacggctggtcagatattctatctggaatgcccgttttgggaataagagaatccaaaaaacgagttgttgaatttcttttggatttagacacaataaagaacgaaaaagagcgggctcgattaagaaatgtcaagattcaaatcgagaaagactgggaaaaaaggatcgaagcatttcagtattatgtcacaagccatggcggggcagtaattaatctgccattacaccctcgagtattaaatgacaatgattatgcgcggatagcaattttctcggatcgtaatgaaccaatagccgatgcgattcaaaaactccaagaccagtataattcgatatgtcttctgaagcctcgagtaatcgacaattttaatgagctaaatagtgaactttctgaaacccttaagtcaatacgcaatcttgagaaagatgaagatcatattacgacagagctatcctttgaaagtgactccattcaacacttagagaaagatatcgcattaatcgatgcagacattcggaacaataatgatgcggcacggctccaaaattttggttctgataattcgacagataattgttccagtatctgccctgtttgtaatcaggagatccatgataatatgatccttgccaaatctaattttgtctttatggatatcgaggccaatatcctccatttaaaagagcaaaagaaaatgttggcatttgccctcgataatcgtcaagctcgaaaaggacaacttgagcaagaaaaactgcggctggcagcagatatattgactcttaggcgtttagcacaagccttaagatcagacttgtatatgactacagataatgatagttctgaagcaattgttctaagaaaaatcgagattagtggaaaaatagaagaatccaaaaaacttcagaaggaattagacaaatttcttcttgaccttgatgatctgtctgagcaatggcagacttatcttgcacacaaagcaaaattgcctaagcatgataagtcagatgcggatgtagagaagattcgtctattaaagtcaaagttcattgagaacctgaaactttatcactatagtagtgtgagcgatttgggcgctattgacatatccgaagaatcactattgccaacaattgatggatttgatatgaaatttgactcttctgcaagtgacggtatccgtgtaatatgggcatttacgatggcgttactacaagtatcgcttgaaaaaggtgggaatcatccagggataataatttttgatgaacctgcgcagcagagtattgtccccaaagatatggataactttattaaatccacaacatttttacacacaaattgtcaagtaataatggctattacattaaatagtcatgaactaatcgaaataattgataatctgaaaccagatacatatcagaaaatcaatataacagggaaagcctttcagttattgccttgataaaggtatggtgtaacagcaaaaataggttactaacattttcactacgctgaaaaatcatcgacaaggaggagaattactcagcctccttgtcggtgattctttttactttactttttgcccatgtctgcctctcttctcctccggtggtcgcccatcacctttgccctcgtccttcagtcgctgtgcttccgcaatctccgctttcatctcctcgatcagcgtcttcagcttctcctcgcactcctcacgggtgtgagcgtagacattgcgggcgtgctttttgccgtcgggccacttgggagagtagcgcccttcaaagaggtggtcgttgatctcgttgatgcagccggtgccggatctgcgcttgcggcccacatagggcttgaagtcggtcattttcggcttgtccgccgtggccggggcagtttcctgccccggctctgaagcgtcctcctgtggcgctgccttgccgatgctccggtcgatgttggcggcggctgtgcgctgcatatcatcggtgatgtgggtgtagatgtccagcgtggtggccgccgacacatggcccagcatggcggagagcgttttcacatccatgccgttttccagcgccagcgttgcgaaggtgtggcgcagatcatgaaatctaacatgtttgcatcctgtgtgctccaagatgaactgcagtctgcggcgtaccacgccgggtgtaatgggacagtcctccttgacaggcgacgggaacatccagcgggagtccactgttttcttatactcttgcagcaccgccaccacggcgggcggcaggacgatctttcggatggagttcttcgtcttgggcgtgctgatctggagttgaccccgcacatcgtagacctgcttgttcacattcagcacgccggttttgaagttcaggtcgtcccattgcagcgccatcagctcaccccggcgcaggccggtggctaagtccagaaggaagacttcgtagtagccctcgaacttcgcctgaatgagaaaccgctgcagctcctccctcgtcagtacctgcatctcccgcgcctttttcggcggcagcttgcagccgatggccgggttcacacgaatcagcccatcctgcaccgccttttccaatgcggagcggcaggtggcgtgacacatacgcaccattcggtcggacagcccttcgccgtacttgtcggtgaaccgcttccggccgcttttcttgagccgaccgtagaactgctgcaggtcgttctgtgtcagcttattcagtgggatgtccccaatctccggaatgatatgcaggcggatgcggctctcgtaggtctcctgcgtagttgggcggatcttgggcttggagtgattctcgtaccagtatgtcagccagtccccgaagggcatctcggcccgcaccttctccggcttcagtcccccgcactcctccttgagcttctggagcttctcgacgcactccttcttggttttggcgaggacgtttttcgttttgggatagccgttatcatcgtaaccgatgacgatgcgtccttcccagcgtccgtccttgcgttgccttacagttccatctccggcttttcgttttcttgccacggtttcaactcctttccgaagatatcttccatgaagctgcccacgataccgcaggcctgcttctgcatatccgaggtgacatgggtataggtgtccagcgtaaaggaagcgttggtatgccccagaatccccgacagggtcttagcatccacgccgctggtgagagcgtgggtggcgaaggtgtggcgcagatcatgaaagcggatgctgggcagtcccgcccgctgaaggagcgtcttcatgcggcgataggccgcattggggtcgactggattttccggcttcacggggtctgggaaaatccatttgctgatggcgtccgctttgcgccgccgcaggatttcagtcacgctgtgcggcaggatgatggttcgcataccttgattggtctttgtctcaccgacggtgtactcacccttccgctggctgtggagggtgcggcacaccttcagcgtcccggtgtcctcatcgaagtcgccccattgcagaccgcagatctcaccgcggcgcaggccagtcatcagctccgtatggaagaagtcccgccacacctcgtcctgctccaccactgtaaggaagtcgtccaactccgcacgggtgagaatgcgcttgggcttgtagttgggcttgggcgccgttgtcccctcggtggggttcctgggaatgacatgcgcctgcaccgcgtccttcagtgcggcgtggagggtggagtgaatgtggcgcaccatggagtcggagagctgatgccccatctcgggatgctcgtggatgcgcccctccgttttcaggcggcggtacatccgctggatgtcctgctgggagaggagggagatctgcttgtcgcccagttgcggcttgatgtagtattcgatgtagcggcggtagccctcgagggtaccgggccgcaccgtacccgccttgtactccgtgagccagcgatccagccactggctcagcgtcatgcggctgtcctcggtcagctccacatcgcggtagcactcgatgttctggtgcagcttgtccagcagggccttttgcgtcttggcatacacatgacggaacagcggctcgccgttttcccggtggccgatgacgatgcggccctcccagcgtccgtcgtcacgccttcgcaccatgccgtcaccggccggtcttcgttttgccatgtatttcacttcctttggattcgttttctttttgtaacacaaacaactaccacacttttgcggaaatagctattgcttttctcaattctttttctgcgttttgaagtgcaaattaggtgtaaattggatcaaaatcggggcatggggccggtagagcgtcggcggaaacccttgaaaacactgaagaaactggaactcggagcgttccacagggtacaaactcccgaaaggagcgtgcctctgtccccggtcacaaacccttgaaaatgcccgcactgcgggcatttgtgggacggaccggggcgtttacgaccccggtcctttctcctgcttttctttcgtcggcggcaaatcggtccgattttcggtcatcccgcccggtcaagcatccacggcgcatcacccccttccgggcagaacacactgcggtaggtactgatgtccggcaccatgccctgctccagcatgatctcactttgcagcaagcgcacgcacagctccgcatagacacttcgcatttcatctctacaccgacgggcaacggtcttttgctcatcggtcagatcaccgtagtgttcatcgcagaggaacaggcgaagctcctctgcgtcgatggggtcggcatgatccttgttccacgcccaccggatgtagcgcactgtgtcgtgtgtgcgccgaaggaccatcatcgggtcatggttcacgatgaagtttgcaatctgctgcatcatgcgctttcttcctccttcttcttattctgctgattcaattcggccagccgcttctccgcccttgcccgctccatgtcacgctccgcctgaaggaactgccgatggtagttcagttccaacgcttcttgaatgggacggatggtgtagatgagacttccgttgcgcacgcggccgtcctttgtggtgatggtactgggctcggtgtgaataagccccttctcctccagaccggccacatacttccgcacggtgttttcgctcagctgcaccgcctttccgatggtgcggtagctgggatggcactggtagcttctgcgatcctcgcagcgcagaaggtaattgtagacggcaatctcatgcgagctgagaccgaggttgaacacctcgtttggcacgaggtagtaatacttgttcggatctcgcttaggccaacgccggaacatcaggcatcacctcctgtctgcgcatctacccaccggcggaactcttctttgggtaccacgatgcggctgcctatccgcagcgcggggaagcccgtctcgtgcatgagctcataggcgctggagatggacacgcccagcacctgcgccaccgtgttcgcattgaggaacagcggcagctgatcgtagttggtgaatgtggattcttgcattggattcctcctttataatttttgatgtttgttgacggaagctacaacgcagcctataggcatcactcctttcagttcgatttgaatacagagaattgctccctgctaaatgccttaaaaaaatccctccacttatcgcggaggaaaacatgttttgcacaccctgttttagaaaatcttttctttgtctatcgcggcgtatcttttgagacagcaaatagaagttccataccatccaacagcttcatgagggacaattctaacattcctctacctattgccgttcttcagcaatttttgggccttttttctatgcgatccacacgcttaaaaatcgttttcatgttcatgccggatatcctaaaatatacgccattccgtttctttgaatcccatacataccatggacgcaaaaagggagccgcgccaattggcgcggctccctgagttgagtgttcggttttacattcccagcgtcggtgaggtgtgctgctcctgctccatcaaaagtttcaagctgtaatccaaaatcttctccttgcgctcggtcagcatggtcagatagaattcacgctggatcggcagcagttcagggacactttcgagaaagttatggagcgcatcgaggtcgattcttgaacagacacgcttgagcgcctcattgcaatccggattcttcagcgaagaaatgtaatcgaaataagatatctttttcccgccttcttcgatagaggaagttgggaaagtatagatacgttggtcgatttccgcttcgtcttgtagcacgtttttcatccgttccaaatcaagctgcgggtataggcaggaaccacaatcatagaccggtgccagttctgcctgctgcttctcctcatccacgaggatgccccagttgccgttatgccggtcaaagtttccaaggaacgcatccgcaataaacatatcccagaaaaattgccgcagctcatcggcgggataaatactctgctcctcaatggcctccagaatggaggacagttcttttccgtaaccattctgctcactgtcgatgcaggtgtttttcagatgggcaaactcaatgagccgttttccgccctctgtaaagtcccggcatgcaaccaccagctttgttttgccgcggctgtccgtatagtttccgaggagcgtttcctgcgtccgaaagcccaacatttcaaagatatgacaggcgatatattcgctgatgcagccgttgctgtagctcatatcccgatttcggctgggctttggcgggaacttgagcatataactgtgtccttgataggtgatattgattttattcccattggctccgccgtaggcgcggaagcggttgactgggcagttggtaaaatcaatcacgggttctcacccccttataaatattttgcgcgaagataatctgcctgctcctgtgtaatggcgttgctccactgattggagttgatcgcactatacaattctccccacaggcagtccatataagacaccttgtctttttcgccctgaacatactcacgaagcgctttatccagactggcgggcagatccttttccaaatagcttcggtcaattggcttgccgccatgcatttgcggtttctccacggtcagcgtaatgagctgctccatcgggatatccagtgtggaagacagcttcacgagtgtaccggcgctgcatcgtgagagcgtcgtcttgccggaacagatgtccgccagcgttgcccaaggcacaccgcttttcttggagagctggtaacgggaaaggttcttttcccgcagtatctgttggatcgtcatatacatcaccgcttttattatatcggtacgccgataatcagtcaagagaaaacatctcactccccctgaccaaactgtttgtttgcatttgccctccccaaaactgttgactattacgatacagacagcgggacaagccttcatggcctgtcccgctggtttttctgcctggattttgaaagtattttccttgtttatggcggtgcagccgctgcgctgctgcctatgatttattcgtcatcatctggccatgatgagatcatgtgaatatcgccggtgtccatatccatcgccatgtgatcgcccatgcgcagcatgagatccccatcggagtccatcgccatattatccgaaatgctcatggcgaagtcgccgtcatcgtagtcaaaaaatcgattgcacactgtacccacctcctctattgaaatatctgctataaacctcattcaccgcttccacatacaccacaaaggatggatgattatgatcttgtcgaaacagatacatatttttcttctcaagatacctgtcccgaaccttctgccataatcccgctctcttcagtttatccgctctatcttttacttgatgagagttcggcacttcgttccatgtgtattgatccaagcccagtgcgtacacatttttgttatgtatcaagcgcatgtaattcccgtttttatttttcgtggtaatagcaacatcaaagctgaattcaacatttggagtatccttaaaatgcagcagtgcagtcaagcaagaagttgaatcttgggcatccgaaaagaattctctcctctccgcccggttcagagcatttcttaccgtttcttttagcaaccgcaggtcattccaatatctttcttctgccttcatgatcaaaagattgtagtcaaggtcatacggaccatctccgtttcttgtgatcatattccttgcgccgcttccaacaagcgaaaactgtgcagaaatccccttcgtcctcagtaactcgcaggttttcttaagggtccttgaacaatccgaacaatagcgctttgcttcggactcgcaaacaaactcatacgccatgcatactctccttcttgcccatgccacccattcaacatcgaggttaaatcattatagaatagcatagaaagtttgattgtcaatagcgacttgaccccattttgaatgttttccgcatatttcaccctatgatcccaattttgttgccgttttcgtaaatgtccgtgccatctttgctgtgattaggtccctcgtactctacccatccgaagcccgccacatagactttgtcgccggggtgcagttctttagaaggctgtggcggagttggctctggtgcggaattcttagcgggtgcctgccccgtggaaagctggagttcggaagctacgggtgtttcaataggccctgtcttcggttcaggttgctcttcttggggcgcttcttgttgcgggatcgttcttttttccttctctgccagtgttgctggttcctcaatttccgcaacggtcgcttccttggcgctcacagcggtttctgcggctgggacgggtgtttcctcgaccgcgttgccatgtggccacacagcggcgcacagggcgacacatgcggcaatcattgtcactatgatgagtttcttcatttctcttcctccttagatgcgaaacgagcgcctgatcccattgccgtttggcaggagactgagcgctcgttttcgtagtgattcaattctacggagagtttccacgccagttcaaatccagcgataaagctgtcgatggaggtctcctccgcaatacggtcttttgcgtcgatgatctggagcaccagccgacgctccagtttgcccagtaccttgctaagtgcttgatggcattcatcaatttcctgtttctgagcctggagttcaggcggggtacaaaagcaatcgtataggtctttcagcagcttgtatttcatgcgctcgcctccttgcagcacaaacatataccacagttcgacggaaatagctactgaaactttttcagaaaaatagcggctggaacattgtgtttcagccgctatttgcgatgcggggtactcgtggtgcgggctcccagctgagctatacccccatggagccgaaacccttgattttaccgggtttccaagatatttacttttgagatgcgaggatgagattgcgggttgctttgccggtgacttgctctcgcaggttaactatacccctaagcaatttttacttctgtttgcatccatgctaagagtttttatgacgatgacagccctgggcaattcgtggtgacattgcgaatgatgataagcgatatcctggcaccaccaatttccgcaaggcatgatcaagtcaacgcgccgttattctctactttttctgcttcggacagttcttcccaatcctcacgattcccgcatctgcgaaggtaatcgtggccgccgtccacggcgcacgaaccacagctgcaaaacttgaaatcatggacggttttactctcgatgacatctccgcactttttgcatctgatcgcgttcttgataattctcggcataatcattctccctttagtacagcccgaatcttttctttttctccactgccgtctgtacggagacgcaggagcggaacggcacacttctccagaatggagtttttctttatgtctcgctctgcctgtttgctccccgcttcgtggaagccagtcccgtctacttcaatcgccagcacgggctgtttatccatctgattgaacagcaggaaatccacatgggtcaacggattgtgggcatattggcattcttcctctgtcagcggttcatagtttttcaccagtgtcgcaagagaaacatgcgccgcgcagccgatgaaggaaaacgcctcctcggacagcacctcctgaatcacggagtacatgagattttcggaatcgtattccgatacccgcttatgtttttgcagatatgcccttcgctgctcggcatagccctgatagagcatatcgaacacggagtagacctggctctggataacctcaaaattgttatattcgatgtaccgcgttaggtcgccatagttggtttggtcattgcgtgggtcctgcgatgtgaccaccgccagcgaatgaaccgcgcgggaaaccgccacattcagcatatgaggatcatccacgaaatctgtgatgacattgtcgaccgaagttagaatgatggcatcctgttcccgcccctgaaacttgtggacggtgtccacctcgtaagtatctcccagctgcttgcggatggctgtcacctggtcccgatacggcgtgataatgccgatgctctggaaattctgctgatgcagccgcggaagcacctcctgctggatgacatcgatctggcgctggttgagatgaccacgggcgtggttgcccgcagtcgtccggtacatagtcaatacatttggctcgtcgtggtccttcgtcataacgatcagctgcccgtggtagaacttctggttgcagaagttgatgattttcgggtggcagcggtagtgttcccgcagcaatgtaacaggcgcgtcctgccatatttccaatgcagaggacagcaggctgtgggtagaaaagcgataacgctcatccaaggaatacttctgccagatggcatcgctggtgcggatgtcatcctctgtcagcacattgggtagctgcttcaagtccccgacaatcacgatattcctcgcgcaggaaaatgccaaaacaccagtagccagatcgacctgtgaggcttcatccacgatcaggtaatcgtagatgtgctcaatgctcagcgtccccttgatggaataggtcgtgctgagcgccactgggtactcgtgagtaaatttttcggaattccggcggaaatcactcatttcaaagcgctgtctgccactctgccagtgataccgcgtcgccagctctgcccggaatagtcgcagggactttcgggtgagctcgtccattttcgcatcgaaagcgtagtgttccagcttgcggttcaactcctgcttttcggcctccagttcccgcctctttacggaatagaactgactttgcaaatagggaataacaagctctggagaacggaggaacaatttgagtgcattgcgattgaaccggaacatgatggagagtttttgcaaaaggcctaagcggctctcatgttctgcgtgctgttcaaattccatccaaagtgcaagaatcttctgcgaggacagtttgtccaggctctctgtcggtgcgtcgctataagtcgcgtaatattcctcgaaatagtgctgttccggattcagctgcaaaaattcctgctcaatttccgcaatgcggttcttggcgttgagcatttcgttcagctcctgggaaagcgcggtcgtctcttgatccaactgctgccgttcctctgtgggcatctcccaatcactcatattcggataggcgccagtttgattctccaggaacttttgcttgttggcaaggcttccgagaaacgcagtcagaaaagaggcattcttcttttccagcttttccgccacattgtgtgttgcagaattattgttagatacgaccgccacggtcttcccgctccgaaccacattggcaatgatatttagaatcgtctgcgtttttcctgtccccggaggtccctgaatgatgctgattttggaggaaagcgcccgctccaccgccagcttctgactccggttcaagccaaacggatagatcaccgcctccggcatctgtggtactttgacttccttctgcggtgcaagatagcttgccagcacggtatcctcgctgacctgcttgatcttatcgtactgcatgctcagaatgttgatgccttccacctcgaggctaattgctgcggcagtctccttgaaatattggaatgcttcttgatttttaccgtctgtcaggcaattctgctggaactgcacttcactcctacggaatgataaatctttctttccgttgcggacaatgcggtaatatccgccgaagtcgagaagctcatcaatttcgctgatggtctgcctatttgcggtgacaatcacctgcgcaggatcaattttctttttcagaggcagtatctccacattactgctctgaaagctgtatgacttattgggcgcactggtatagacgacctcgcacttcccatcatggaactgaaagctcgcgaccgagtccgtctggtcttttccttttatgatgattaagtgctttcgtgcgtccataggcaatcctttcacttgagaatgcgagctgttgacttatgggttgtccccgcacattcgcactggattatagctgtgcccatcagccgcattttagcggtagatgcacatccaatcccctgcgtaaatatgtttccctaatcagttcaaaaacgtctcctgctcgattgtaacgccatagcttaggattttttcaatagcatctttgaacagtaagtatctcccgctttttaaatctgcttccaactcagataagtattctttggagcgcataagaccatgttcgtaaaatttttcaacaagttcacctgacatacgcatgggcagcacagaagaaattagcttctgcaagttgtcgaacattcggaaaccgcccgcatcgatatctgcccaaaatcgcactttagcgcctttcgctgccgcatgagcgatcaatgtaaccatctttcgtttttggggactaaggaatccgccgtgatagatcaccaactctcccggctgtttttcggacatcacatattcatcgtaattggttttattctcaatgaatgtgatgcattgaattgccgtcaagtcgattgctgtaatagaatcgatcaaagtgctgggtaaggccaaaccgtatggtgcggcaccaatacaaatagttccctgttctgttcgaaccagacagtttcctgcaagctcgtataactccgggcgagcatagatacccaagtatgccagctgttctctttcgcccaattcattttcatcgcaggaattcgctaaatctgcatcgtattttcttgcgatccgcaaaaacagatcccgcacatttcgctcaaagtatttggtatcggaaaagcacttgctgctgaatgcgcgcatcgttatactgccggacagagcagaatactcacggaaagcgcagagcaggtcctgcaatggagtatcgtccgttttgcagaagacaggaattttcagttgctctgctgccgatctgcaaacatctaccttccatgctataatccagggaatcgcaacatccttcaggccgccgtctatcagctgaataatctgacttgctcgcaccttgggatgcattctttcggcaaaagcatagcactgcgagatctgatccaagcgcaacacaatagccgaaagtaccgggcggcctttcacccactcgagctgcaccaagtgcttcttttcaagttccaaggctgcttcgttataagcatcccgtatcacagcatcttcgtagatatactcaggaaagtctttcttttccacttttagcataactcttctgagcgatgttccaggattgaggagatgcttactgttttcatatttattcaataggcggtttagaattatcttctggtttttcactgagcaatctccttgccaaagggcagaatatgcattatgtatttgtccttgtttaccagcagcgtacggtctgcaatcggcataatatccgaaaccttatccggcggtgtacagataatggcctgcaagcccatccttcgcaggagacggacgctctcaataatgcgatcactatccattttgttaaatgcctcatcaaacactgccaatcggacggtgttgccgaaactggatgtatcgttcacacggtagagctgagcgaaggaagccagaaccgcaatataaaacggagtctgtgtttcaccgccggactttgtgttcaaggtctgagaaagcagctgctttgttccgttttgatccgtggtttccaggtcaaacttcaggtatgtcctaaaatcggtatatcgttggatattttcctgcagctcgctttgttttctcgcatttaactgtgtatcatccgccgtagtgatctggctgaacagcttctctatcagctggccatatttatcctggaaaggccgtgcgaacaaccctacatcgccttccataagctccggatccataatcatgtcataatactctgcataatccggattacgctccacacggaactgataactgtccgttccgaattgagcctgacgcagtgcgcgatttagattcttcacctgatcctgcacttggtcgatgctggacttcaatttggccagaaaatcattctggaactgttccatcgcactctctcgggcagcgttgatcttttcccggtatttgggcagctcactttcctccaagagcctccgctccgattcaaactcatcattatccatggcttccacacggaaggaacatggcttaaaccggtccgtatactccctacgtgcaatgaaaagctttttccgggcagtatcctgttcctttacgctctgctccaaacggctgctgaagttcttatggacgatgtctgcgcgtttcaggcgggcgagctcctgctgatatctgggaagaccgatgctttcctgatattcaacagggaattcatcttgcaggcggtcttccatataagatagctgctggtaatgatccggcagcacctcatagtccaactggcgaatacgttccttgtgctggccgatctgaattcctttctgctctttttctttattcagcgctatgatttcgtccccgagcgcagcaattgtgcggcgctgttcgtccagccacaaaagatccagttttgaaagctgatcatcgatatcggtcagttcattggcgatctccatgccgtgcaggtatgctttttgcttttctgccacggtattttggacaaaaaagtgcgtaaataacggttcttttgactgtgacaaaagctgacggataggattccaataacgcagctggtcttcaatctgcgttaactcctcttccaatcgagatacacgcagacttaccgcataacggccaataaatgcgtcatccatcagctcacgacgaatcgaacggacaacatatccctggtagagcagtccgtctgctgtaatagcggttttgaaattgcgcagctgttcagctttttcacaacatacgacgcgccccaacagatagtcaatatagctgcgcgccagcttgttatcagtatccacctttctggcaaggctgtcatcgcgcgggcggatcgtttctcgttcacgcagcttaccaatgtccaccagtccaaacgatgcaaagccgaactcttttttgatcctgtcaaagatcaataaggcacttttataatacgccggatcaaccagcagataaaacttctgcgcattgagatatccctccacggctccgcgccaccgttcgtccgcaagctccaggacatccgcaagaatatctattctcacaggactgccgatccggctgttcagctcagattccaagcgggccttcaattgcagtagacctcgcggatagtctttaatgtcctttcggagatttgcgaggacagtgcgtttttggtcctgctcctccttcaactccgccagacgatcttctgctttgtgcagcgcatctcggatggtcttagcaagctcagccgctgcctgctgggcgctctcaaaaggtgccgatgaataggagaatatctcatagcttccggatgtaaaaagcgaataagccttcagaacgctttcggccgcttcctgcacaggcacgaggactccttctgcatcttgtttcaagattgcgtcgcacagaccattcagctgaagggattccctttttatttccattgccaaggattggaggtcctgcgtcagccttttttgctcatccagcagcgcctgcttccgattgcggagtttttcttcctcctgaaacacactgctctgcgcgcaggccaagtcaagttcgcgcctgcggttctctttctgtgtgattcgatcagagatcgtcatgatactcttttcaattgcggctaattctgtggtactgtctctcttttcaagctcaaatcggtcaatttgggcttgttccatttcttttttggaccaaagtaccaaaaatgattgcacccgccagcggtcaatggcctgattcatttcacgatagagtctgcctatctcctgtaaagcagtcagtttctcctcctgccgctgtgccaacatttcatggcgtttataatcccggatattctgctgcatggcctcgatatcaggcttctccggtatgtcgcagatgttctcggtaatgaatttctggatatccacgatagggcggaaggataccgcctttttcatcattcgaaggacctgctcattgtgcacattccatcttgacagcatattcctgcgatattccttctgcgtgtcatagatctccgccttaacgtaattctgcttcaaaaaacggcgcagcgcaggaatctccatagcctctccattttcaacaaagccgttctcgggcagcgttcccacacaaatgaaaaagcgttcctgcctgcttccgtcactgcggcaatcaaaaacaacgcccgtgacaaaactgctgcccactacgtcatcttggaactcacaagcaatgtagctggagaaatcttttccccggcgggaatacgggttattttcatccatatctgcccgcaaataaccgtccagcgtgcgctgagacttttcattggcagcctgattaaagttgcgggcatttgtttctcccaatagaacgatttgaagggcatcaattaccgtggattttcccgcaccgttttttccagtcaagaaattaatatcacctacctcgatgatctctttgctgaaatacagccaattaattagcaggatcttcttcagtttcttcatcggtatcgccctccttccgtagcacagacacaacatcgttcagcttttcactggagactgcagccaacacggtcggtaatatggaaaatttacaaccgctctgattgaactttccctcaatccgctgaataatcgagtgattttccagcaatgtcaacgcacgcttcacttcgtccatattgggctttgctggaaggattgcgtaatccgtgacgaccttttctaaaacatcacgcacggtacaaacggcatcctgctccagaccgagttgttcctgattttcttcataaatcatgcgtagggcaaggagaatggccgtttcttttttgttcaggttgcagcggttcgcttcgtccgtattgatcacatagaaatagccgtttaaatcatctttgcgcagatcccaatccagcagactaagatattcttgcaccgcttcgtaatgcagagataaaaacgtataatccgggttattcacccttcctttgcccggccgaaacagtgttcgcacaatataagtccggctaagaagctggttgcaaacggacttgaactgttctaattccttggaggtcgcactacgaatgaagtcaaaatccatttttcttctccttccgtcgaatctgcatctgagggatggaatagccattttcatgaaacgagccgcccagctctttgatctgatagcctgcggcagaatctccgctggtcaatacagccagcaaactcatgatgtaggatttatcatccttaatgtttaaatctttggagtagcgaacatctgcatcccccaaccatccctgcacataggcggcaatggccgcgcggccatattcggaacgcagcagctgtgcggcctgcgcggccgcatctgcatcggaagccgtttcctgaataagaaccgtggcagctcttgtccgtttttcggggcgctttcgataccacaagcttttttcagaaaggaatgactgctcataaagctgaaataccggttgtatccggtctactaaatcaccggcgcgtcgattgcgcgacaatgccgtgagcagtacattcaagtttccccgaacattttgatcgcgatttgtcaggttttctaccttttgcgttgctgctctcgtatagcggcgaacctgcgcatctatttcatcgagatagtcatgctctatattgtcatatcgctcgtcgatccagaaaatcttttgcagcagatcggaacggcagttttccactgtatctcctcgtttatcctgcaaagctgcgttcgccatggcaagcagcagagcatcatcctcagcccagcttctcaaaacagattgaattggaacgcgatactttgggacggagtccttaattttcaacggtcgtatgtatgcctcaactactttctgtccaaactcgttgaagtgagaggccaatacctgattgacgtcctgcatatctatctgcatctgaaaataatgcttcacattgtgatagaccatttgcaacaaatttatgagagcactggtgttatcataggcactgtaaattgcggccatcttatcgtaaacgctttcgctctcattggcgaccttcagagcagagtaggtaccaaacacataggaaaatccgcgagcaggacgatcatcccggagctggtgaaacagctccagcagccggctgctgtaacttgggacggtaatatactcctcaaaatcgtcaccccgttccttttcaaaccagcctttaccgcagagcttccgaatcaaaaagcgtgcacggccggagatatcccgcagctcatcctcgtcaatatcttccccttcaaacgtagcatccgccagttgctgctccaatctgctgcggagcatagaatacagcgtgtcttcgcgtattttaaggttttcacggtatgcggtgtacagcacatccagagcatctgcgtatagtgcgcggttgggcgaggccaaaggtgaaaaaagctcaccaggaaccgcttcaaaaaacttcatgaaccttcctcctacaggagacgacaattatgattggacgattaatttggaatcaggataggccagatatcgtattcgatacggggacactatatggcgggcttcactgtggagactgctttgcatgttggctggatgggcgctggctcgatgttcgcctggaatatatgaatgattgggttctgatccacaacggtctttttgttccagttcgttatggcgttcctgtgcgaatttaatcagcccactaccaacttatttgtcttcttcaagaacttcgccgggatcgggcggtccagctgccaggtgatgttcatcggtctgctgcccgtatgcttcacgtagttcgccgtgcccagataggtgtacgcttctgcaccgccggtcttacggtccgccttaaactcacgcacaaacagcagtaccttgctgccgcgttccttgtggtggatatagcgctgaccggtggacgaattctccgccgtggtgctctggctctgccaatgaaacaagctctcattgatggaataatcgttgtacatggtggttggcgaatagtccttgtccgccttgttcagcgtcacaaagaacacatcgatgtttttctccggcagccacttcacgccctcacgcacggttgccggtttcataaagtccatcgccaccaacagttgatcgcgggtataggtgcagtgcagatccaacgggcagtcgaagcccagttccaccggctcgtcgataaagtcgatctgctcgaagcgataacgcagcagctccaagagttcaccgagcagaactgtgctgtcagacagggcatagaggttactaagcacctcttcgtcgtcccagtcctccaccaccttgccccagacggtgacatagaacatctgcatcatccgcttttccgcatccggaagcgctgcaaaatcaagattatccaaacacggaaggacgtccagcaggaacgaaatccagcggcgggagtcgattacagcaagctttgcaaacgctttggtcaggatgtcctccagcggctccgaaaagtcctcgatggcatccgctctggcgcaaatgcgagagaaggaggaaaacttgtagatcgcccgcggatcaagatggtagtaatccaagaagtttttgagcgtcagttccagcccactgtcctccgtaaaagatgctgcacgagccaccaacccagccgtattgccataggacgcgcggatattctccaaaatgtatttggccgctttcttctccaactggatatagcagcccttgggaacggacacaaagccgtccttgatctcccggctcacgctgcgggtggtattcgacagcagcgccgcaaacttatcttcaaaattgtattttctattcgcctgaccgatgaagtccagcacggtcaggcattccttgtcctcagatagacgcaggccacgtcccagctgctgcaagaaaatcgtcaacgactccgtgggacgcagaaaaagaaccgtattgacttccggaatatctacgccctcgttatagatgtccacgacgaagatgaaccgcacctcgccggacaccaagcgccgcttggccgccgctctttcctcgtccgaagattgcccggtgaggcacatggacgggatgttgtggtcgttgaaatagcggcacataaattccgcgtgatcgaccgtcacacagaagccgagacccttcacctcgtcaatgtccgtcacatatttcagcagtgccgtcaccacatggtcggcgcggcggtcggcaaccgccccactgaacgtatagatatgctccagctcactcttttggtagccaccggcagaccatttgagcgcatccagatccaccgtatcggtaacgccaaaatactggaacgggcacaggagctttcgatcaatggcttccggcagacggatctcagcggcgatacgattgttgaagtagggcaggatgctcttgccgtccatacgctccggagtagcggtcaagcccagcaggatgcgcggctggtagtaggacaaaagcttctggtaagtcggcgcggcggcatggtggaattcgtccacgatgatgtaatcgtaaaaatcgggactcgtcttttccgtgaagctctgtgagttgaaggtctggatggacagaaacaggttgtcgatgctctccggcttatagttgcccacaaacagctcaccaaagtttgcgtccttgagcacagcgcggaaggtgtacaagctctgcttgaggatttcctctcggtgcgccacaaacagcaggcggcagggtctatccagattctgcttgcggaagcgcttgtagtccagtgcagagatgaccgtcttgccggtaccggtggccgccaccaccagattgcgcgtatagccacgaacagtgcgctctgcctccagcttgtccaaaatctcctgctggtaggaataggggttgatgtccatggtgtagacgtcagcattgttggtgtcgaaatatttttccgccttcaatgcccgtgccaagcgctctttctgattctctgcgtagtattcaaattcgcggtcattccagtaatactcaaaggtagcggcgatcttgtcgatggtttcgggtaggtcgcgccgcgttacttttgtgttccattcaaggccgctggtcaatgcggcattggacaggttggacgagccaacataagccgtcgtgaagccggtttctcggtaaaagatatatgccttggcgtggaggcgggtcgtcttagtgttgtagctgaccttgatgtgcgtattgggcagctttcgaagctcctcaatggctttcacgtcggtagcgcccatgtaggaggtggtgatgatacggagctcgccgccgctgcgcgtaaactcccgcaactcgtccataataaggcgtagaccactccatttgatgaaggacaccagcatgtcgatccggtcggccgagacgatttcctttttgagctcggtaaacatctgtggctcatgcacagccccggtgaaaagtgagctttgtgcgatggatgtctctgggcgctctatgtccgccgccgttttccccaccgccagccgcgggtcggtctcccgtaaaagcgcaagaagctgctctgcccgccggtcaacgcccagcgcggcaaagtcagcttctttcgttgtattttgaatgagatcaacgatctggttggtcagcccgatctgggcagaaatatccccgccgttgtccagcacgttatccaagcccttttgaaccacatctgccagatactgcgccagcaccttggaggcttccaccttgtcaatgggcgcaacagacttgcgggcctccggaatctccgcaagctcgcccgtcaaggcgttgttgatgacttgttcgtataggccgggatgtaacatagagttttctcctcgttgaaaaaacttttcctcttcatgtacagtacatttatctattgcagagcaaagcatccccatcaagcaagtggttaggctttgcttgcagagggtcgcatagtagcatcaataataaaataagatatttttctttttatctctttgtccaactcgttgtagaaggcaataaaatgttctaatgccttaggatgtccattatcgataatcaaataaattgcctgtttagttttctcttgtttcatgtatgttggaagttgaatttcaattccgtgtcgtaattgaggatttgaagtcagttttgtttcgacaatgactttatcagttgctcccctcgataatttaaaatcgacaggacctctcccgttgtttccttcttttgtaagatcaatgttattcgcgtcacaatatgaatcggcaataccataaaaaagtaactgcgccgctgattcatgtttgggcgttccatttgaattataaagaagcttagaaagtccgttgtcttcgactaaagtcttgaattgattacagatcgtttttgctatagttaggacgtcatcactggtttccagtggtacttgtgagagagatagtggatatttttcggtatactctcttgcagcagaaagccacacgtattcgccagctggatcttcagaaaaatcatacacccttttaggagttgctttataagcagctataagagcggttcgaaagctcgtactgttacgcatcaaagtaaggatttgagacttatgaagttttgttttctttcccaaatcaaagtaactgttgatttcctcccgaactcgctcattctcttggcaaatccagtcaatatcatcaaaagtatccgctataggtaatggactaaggatagcagaaggtaagagcagaagcggtttgttgttgtaaggatttctacacgttttatatattttgtgtccgaaactaaccgaaagcgaatcgactccagcaaattcagtcacgcgctgtgtatattttagcatatcctcacggagaataaatgttattagatcgcttacgcgatcgcagccaattccttcttgaaatactcctaacaattcaaacaataccggatccgtatctccttcagtcataagatcttgtatagtgttcaaaatcgtttttctaagtactgagccgattgcgtttccaccggttccgttttgagagtatccaaaacatgtaccagacagttccgtaaacgttaacatcctctctgcacgttttctatacatatcagtttggcttttggaatgtctgagtaatgttataatgtcagaaaagtacttttcaacctttttgcgtgcatccagaaactcaggttcagtgcataactccaaaagtgcagggtctatgaaaactctggtgtcaatatcaagaatgacatcaaatacgccagttatttcaaggacttctttagagatattgaattgttctgaaaatgtaattggcatacagtatccccccggtatatatcggtaaaggcaatttaattatgatccggtacaatctccacaatatcctcaattctacaatccagtgccgcacaaatcttcacgagtatctcagtcgtgacatgaccattccgtcccatcttggtaaccgatgctgggctgataccagccttttcacacaggtcttttttcttcatatccttatcgataagcagcttccagagttttttataactcacagacataaaatatctcctccgtaccgatatacaaaaaatgctctgccacttggcagagcactcggtctattgcagccatactgccaaggcctattccaacacttgacagcgttgtttataacgatagcacattcgggcaggaaaagcaagaaaatgataaatacgcacgaattccgaccctgttggatttcttttcgagctgcaaaagaaacagttgaacctccgggcagtcagagctacaatgccaacacctcatcgcgaggacaaactgattggaggtcaaatgatgaattatgaagcaagcccgtttcaggactacgaatcgatcaccattgatgagctgaaggatcaagccaacagcctattgaatctggtaacggatgagcagcgaccactgcgcgtatgcatgaataatggcaaggagtttctgctgttccctcaggacctgctcgcaccaatctatgactctgactttcgcttgatcctgctgtcggcaatgcggtatgcgatgggcagaaacacatgtatgcccgcagtagtttccgattatattaagcgccacattcggtttctggacgataagtttcttgcgttggctgccgatgatattcggcggcacctcgaagactacgcagagcatgagccgaacccgaatctttggcaaggcctttttgatgcactcgaagcagagcagaaagcgcgtgccactcgtcaggcaaggaagattcggtcttgtccgccctgcggaaagtcctcgctttgagtgccaatcgaaaaatattcatgataaaattacgacgaaagtcaacagcgtttctctcgcagggcgcagatgctttcccttactccgggtaagttttcccttaaaacaccaccagaattaagggaatgtaataactgttagggtgtgatggtattctttgtctatagcgatgcaaattctgcgccgcctattcctgtataaaggacttgcttaacctctccggcagaggtacaatgcgacaggctggagaggcaaatcatccgtccgcggcactccggcagaccataaaaaaccgctttctggcccatgtcacgagggtgttcagaaagcggtttttgaccacatgtttgactacaggcagccgtggagtgtgcggaaacagtgtagtcaagagttgcgaagagcatccataataaagcaaaagcggctataaatcgtcgaaaaaagtagaaaaatttttattcaaaagtttgtctatagcgaggcagattttaaatgccccatgcgtggatttgaatactatttttctttattccccgcatcttccagcagatttgtaaccacttcactgagctgcgcggcgttcttggaggtgatgacaggaacgccggtctgcgtctcaatggccttccgtgcgtcgccagccaccttgccaccggcacgggccacatctattggattttgcatatgctttcgcatttgaaggccgcagacggcgttgcgggtttcttgctggcgaacggtgcgttgggcgacagtgacactttagagattcgcaaaaaactgatttagaatgataaggtggaagccattgtcattcttcctcgggaactgtttatcaccaccgatatcagtgtcacgctctggatactgaaccagaacaagaagggcgggaagtatcacgaacggatgcttcgcaaccgggagcatgaaatactgtttgcaaaagcagcgtacgttcaaagaaaagatacaactaatttcctttttctcgttttattcaactcgtttccatgctatacgattgtcgaaatataattgctctgtgcgcgttgaagacgaatatcacacagaacatgggcagaccgcattgcgccgcgactttaattttgattctccggtgacacagtaagaagtgacaagactctataagtaaacaccgaatcgcacagcgcgggcattttgacctgatactgtgcaatttctttttcacctcacgaaatgctggcctgcacagccgtttgctatgcagcgcgtctcatcctttgggatgatttacatttcagaacagccgcgtataatataatttgagataggtggcaaaaggcttatgacaatctcactctgtatcaaagggagggaagaaatgaccgaaaatatcatcataaagccctccgttcagaaacggtttgacagcttcatagcgcatggcagagtcctttttttcagcgcgccctgcggctttggaaagaccgtgctggcggacgcgctgctgcgcgggcggaatgtgctgcggcaaagcgcggcagacccagactgcgcgatcccaccgtcagcgcaggattgggacattctgctgattgacgatcttcagctcatgcaggaggaagccgggcagcaggctctttgcgaattgattcgctcaagtccggagcgccatttcgtgctgctctcgcgcggtgtgccgcccggctgcctgacggcgtttcagtacacggggctgatgacggtgctggaggccgacgacctgctttttgacgcggacgatgtgcggcgactgtttcagctttcgggagcaaatgtaacagatagcgagatcgacggaattttgaaagaatccgtgggctatccgctgggcgtagccatcaccgcccggtgtatgtctccgggcaagccgtggacgccagagttggcggcgcgggtgttccgggaggtgttcctctactttgagaccgccatctaccggcgctttgacctgccggtgcggcgcttcctgttggagctggctccctttgaaagctttgacctggaaatggcgcggatggtcagcggcgatccccgtgccggcgaacggctggactggcttcttcgatacaccactatgctgcgctacgacgactgccagcgcttccacttctggtcgggtttccgagcttttctcctctgggagatggaacgggagtataccgaggaaaagcgcaaagcgctcttcagccggggcgggctgtactatgagctgaaggaggactacgcccacgccctggaatgctacaccagcggcggtgaccattccaaggtctccgagctgctggtgcgcaacgccgagctgcaccccggcatgggtcactatgccgagatgggaaaatactaccgcagcctgccggaggcggaaattctcgcctctccctcgctgatgcagggcatgagcatgctctgcgcgctggcgatggactacgaaggctcggagcgctggtacggcgagctgcaagcatttgccgagcgctgcggcaggcaggacgccgccggaaagcaggcccgcagccgccttgcatggctggacatttctctcccccagcggggcgtgaacggtctgacggaaaccattcccgccgtgttccggctgctgatgaacaaggaagtgacgctgccgtccttctccgtcaccagcgcgctgcccagcatcatgaacggcggcaaggacttttccgcatggagcaaaaaggacgacctgctctacaaaaccctccgtctccccgtggaggcggtgctggggcgggacggcgtgggtcttgcggactgcgccatcgccgagagcaagtttgaaaagggcgaggacgtggccggtcggatgctgtcccttctcccacagctgaacgaggtccgcaaccgcggcacgccggacatggagttcgccgtcagcggattgctggcccgcagccagatggcaaacggacagcccgccgacgcgcggcgcaccatcgaggcgctccgcgaacgctttgccgagcgcggtttgacacgctttctgcccaatatggacgccatgctctgccgtattgacatgcacaccggcgaccttgacgcggcggacgcgtggtatcgggaaaaagccccgcgggagccgacgcacctgaacgtcatgcggcgctaccagtatctcacccaggccatggtggagctggaggacggcagaccggacgcggcgcagctgacgcttgccccgctggagccgtatgtccaaaactgcgcccgcctcatcgacggcattcacctgaatgtcctgactgccattgccctgtaccgcaagaaggacgagcggtggtgcgagcgattgacggcggcgctggacgcggcagcggagtaccgcttcatccgcaccatcagcgtatacggcacggcggtgctgccgctgctggaagcactggactgggacggcgacaaagcatggcgcaagcggctgatggcggcggtgcggacgcaggcggcgttctacccgcatttcctcgaaccccgccttgcccccggcgaggagttgacgcccacggagctgcaaattctccatctgctctgcgcggacaagtccaacgccgagatcgcgcagatcatggatgtgaagctgccgaccgtgaagacccacgtcagccacatcctcgacaagctggacgtgaagcgccgggcggaggccaagaccgccgcgaaaaagctgcatctggtaccggaagagttataaaaacagcgtccggcggacgccggattcgacataaatgcaaactgatctcaaggaggaaggacatgaaaaaacgactattgagtgcattcatggcgctggccctgtgcctgacgctcctgcccgcccccgcatgggcggcggaagcgaacgcgccggaggggacggcgcagacgcccccggccgtggagaaagcggcagacccggcgaacggggaagaacagcaggagaatcagcctgcgcaacaggaagaacagcaggaggattctgccgcaaagcaggccgtggccaccgtgcaggcgatgatcggtgagctgcccagtctgggcgagctgaagggcatggacagcgacacgctgaacgaagcctacatggccgttcagtcggcctatgacgcctacgaggccctgacggcggagcagcaggcgcagattaccggcgcggagcgcttcgaggacctcttcaactggttcaacgggcagatcgcgctcctggatggggatgtaacaatctacccggatgatgttaatgcaaatggtgacattataccgtataccgatttcagccgaacgggtcccctgctcacaggaactgagacgaatttgagcaacaaatattatgtggttcaaggcaccgtaaccatcaacggggatttgactgtcgatggttcgaaagatggcggtctggtgctttgtcaagacgcaacgctgacgatcaacggcgctctgatccacaccggcggcgataagttttacatttacgggcaatcgaacaacggcgccgacgccggggagctgattatcaataatcctaatggtgatggcgcggcgattcggactgcaagtactgcgcgtctgggtatcagcggcggcaaggtgacgattatcagcgggaattccaaggaacttattggcgatcatattacgttgtacagcacaaaatcgatacacgaaggcattcttgacggcgatgcgaaattaccctcggagtgggggaaatcctccatatcgggcggggaactcgtcattgagtactgctggcatgaccatcctacgtatacgccctccggcgatacacagcatataaagagctgtacgcagtgcggctttaatacgggcaatacaacgctaaaggcgaattgcggaaacgatggctatgaaagaactgtgtcggccggagtcgagggacaccgtaaggaatgcccctgcgggaatctgtttggcgatgtgatcccacacgacacaggctacctgctgtcaagaacaaccagatgcacattgcgggatgcgcaatctgcggctatcaaagcggctcggaagaacagcacgtttgggataatataaaaacaggcgaatgtgtgaagtgcggctttatgcctgtagccgcaggtgactacgactatattttcgaatcggtgcaggatgccttggatgcatttgctaacggcgatacaatctccgcggagctgcattccgctaagagtggtaatacggaaatccgcgacgccattgtattcgactatccgggtaaaacgcttacattgaatatgaacggctataccttggaaaatgagggcgctcccgttatcacggttgaggcgggcacgctgaaaatcaccggggatgcaatcatcaaccagatagctgcgggcgctgagttgattacacccgcaatcagagtcactggcggcgaactgatttttgaaaacaatttgaccgtgactggcggcaaagccggcgctatggttgggtccgcgattgaggtcacgggcaacggcacggtgaccttccagggcgaagtgaacgcaacggctcagctcatcgactcaactacaagtgaccccgacctttcccctgcgatcaaggtgacgggcggcacggtgacctttgcgcagaagctgaccgccacgggcggcagatacgacgacaaggcgaaccggaaacaacagcagcccgcggtttctgcctcgggcggcacgctggatttccaaaacggtttggagttgaacggcggcctgacgctgactggcgacgcggcgctgaaaaacaagctgacgcagggcacgttcacggcaatcgagggtatagacgtgcgccgggtatcggtcgatggttcgaatccctacaagcgtatagctgacctgctggaagatggctatgcctttgctgacaacaacaaggcactggtagaagccggaggttcctataatatttggacgatcagcgatcttaccatcgtgccgcatacgcatgattggaaaccggatagcacttatacatatctccatagatgcgcgtgcggcgcgtccgacaatcatagcgattggaaagacggcaaatgcggagtttgcggctacgcttgcctgcatgagagcgtgaataacgatggcacatgctttacttgcggagagaagatgaccgtagagatcgtggcgaaggacggcacaacgacctacggcacagactttaaggcggcgatgaaggcggcagagaatggcacaactgtcaagctgctggcggatattgaatggggcgtgactccccaagacagagcggctattaccggagatggtaaaattgttacgctgaatctgaacgggcatacgatcaccggcggatggtttgatattgggagcaataacaatcctacatcctgcacattgaaaatcatcggagaaggcggtcacgaaagtctagaggggatgggcggctacagcggtgtttccccgaaggctacgctggatctgagcgagtgggaaggcggtacgatcagcgcgatcaatatatcggatgactcgaaatatgacgaaacaacgcgggaagccgcagtaatcgtaggaccaaaggcaggtactatcggaaaactgacgttcgggaataatcaacttggcgaactgaaaaagacgaaattgagcggcggcagctttaatgaaatttgggcagcgaacaaccagccggttaagcttggtgaactgcttgcagatggctatgcgtaccagaatgaagatgggtcgtatgtgaagtacgaaacgacacttcggggcgcgtctatctacaatgtcaaggtcgtaaaatgcctgcatccgaacatgaaaccgggtgaagatggcgtagcgacgtgcgaatactgcggcaagagcggcaaattcgtagcctcggtggatggcaatctctataccgctgaccaatggaaggatgccttcaaagcttggctgggcgatgccgaagatgagaaggctaacggtatattaaagctgtatacagattataaagctgaagcggcagatgctacgtggagcgttggttatcgcccgaacggcaatacgcttgatctgaacggacataggatgtcggttcaaggtgacggcgcattcaagcccactaataatatgcatttgacggttaccgacggcacggagcgcggtcagattgagaatatcctccttgatgggaatcagcgcgggagctttacgctggagagcggttatgtcggcaatctggagatgaccggcggcgctgtcgttgcgctgaagggcggcagcgttgacaagctggatgtacagaattgctccgcaaacacaaatctttccatccagggcggcagcattggcaaactgaatataaaggattgggctgatggcatgcatgtttccgccacgggcggcagccttggcgcgtataatctgccaagcggcaagattctcgcggatgtgctggatcaccaatattacgctacaggcacaagccttgataaacgggttgatgcggtggcgcaaaaatgggaaaaattcgttatcaagcaagccccttacgactttggatcgacttctaaagcggcaaatgttcccattaacggcagcatccccttcatggttggctcacccagtgaaaatgtgggcttgtacgatgtgaagtggtatcgcagaacgaacagcggcgcagaacatatgacgctgaatagagtggctgacgtgaaggtcggcgatacgctggatgtattctgcgtgatcacagggttggatagacccggcggagcaatgcagtggcaggtggcagtcaaggactatacgataaatgtcgtgcctgccaagctgaacgacgaccgaacggtcattaggcagaagccggacacgggcaacacccaaaatccggcagacaaccgcctggtggttactccgttttcttccggcgcgtttagcgatgtagaatacaaatttgaggtgacctacaacggacagccgctggaattgaataaagattacaccattaaagattcgaacaattgggcaaggaatgccggaacgcacacgctgaccatcgagggcatgggcaattatacgggtcaaaagtcggtgacatggatgcttgagccgtatgagctgtcggttgaaaactatcgtcatgcccagattaacaagacgtacgatggtacagatgcagtgactgacagcacaaacggaatcgacgcgttaggcggttttatgcttgattcgaagaacccgcggaatcctatattgttgactttggataatcttgatttggacaagagcgactacgagttgagcaatatgaaattcgactccgcggaagccggagacagaaccttcaccggcacaatgacgctgacacccggcggcaactttgtctttgccaaaggcagcagggtgatgcagatcgaatacagcagcgaccgtatgcctgtttatatcagcagtgcgatcatcgctgcccccgcggccaaggcgctgcaagtcgcgaacaaccacgcggcgacgtatacggtcgatctgtccgcgctgctgcctgcgctggaggctcccagggagtacggcgcggtgacctacggcgcaccaactgtcaacttgtccagcggctattacaccgatggcgcgagggtggaagacggcaagctgattttgcccattcgggccgtggaaacgaaagaaacaggcagcattggttctgtcaaggtcaaggtctctacgaccaactaccatgacttcaccctgaccatcgacgtcagcgcggagaacaggatcactcccaccggcacaccgacgctgagcaagaacgccatcacctacggcgacgccctgaataccatcgctctctccggcaagatggaggatcccaccactggcgcagcggtcgagggcaccttcacatggcagcaaccgggcaatacgatcctggatgcgagtacgtttggtcatgatatcggatggacgttcacgccgaacgatgggaatacctatacggaagcaaccggcaccgcaacggtcaaggtcgacaaggcgcggcggagcggcgagatcagcatgacgggttatacctacggtcaaatgcccagtattccgagcctgacagaacagacgggtgacccgaacgttcaagtgacctactattattccagcgttggcaatggcaatatgcaggtctggagcatcaacgatccgcccgcgctgaacgccggtacctaccgtatgtctgccaaaatcggcgagacgaataattactatgagtacaatgccgagttttgtgaatttgtggttgcaaaggcaacgccggcctacaccgctcccaccgggctgacggcaaaatacggtcagacgctggcggatgtgacgctgccggacggctggagttggacggatagcagcgaatctgtgggcggcgcttcgactgccgccaagaccttccaggcgaagttcatcccgacagacaccgaaaactacaacatggtggagaacatcgagcttgaagtcatggtgaacaaggcggatggcggcagcctcaaaacggtcgagctggagcagaagtacacggacacctcggagcacacctacacgccggattgggccggactgcccgccgggcaggactggacgttcagcagcgaggcgagcatcgtcctgtccaagcaggacttcgcagcggacggcagcttgctgacctatgccatctccggcggcaaggtgggtgacaagatcaccatcaccctgaaagcctcctgcaacaactacgaggatttcaccatcgccctgactatcaccctgacagaaaaggataatcagcaggcactgcgcattaccggcggcaccaccgtggtctacggtcagaccttgcagcttggtaccagcggcggctccggttccggcgcggtgatctacactgtgaccaatggcaccggcgaggcgaccattgacgccaccggcaagctgactcccgtcaaggtcggtaaggtcaaggtccgtgcaactaaggctggcgatgcaagctacaacagcatcaccagctctcccgtggagatcaccatcaccagagccgtccccaccggcgaacctgcctataccaagatcaccacttccggcaagacgctggcggatgccgccttgggtatcggtaccattacgcctgccggcggtacgattgcttgggacgaccccaccaccaccgaggtggttgcgaacaagagctacgggtggacttacactcccaccgacaccaactatacgacgctgaccggctctatccagctgtggcacaagtccacctcctccggcggcggcagctactacgcccccacagtacccgatatgcctatgctgtacagaggctgcaccggcgacgctgtcaagacgctgcaggataagctgaacacgctgggctacaactccggcaatgtggacggcatcttcggagccaagacctatgcggcggtgactgccttccagaaggctaatagccttggcgtggacggtatcgtgggcaaactcacttgggcgaagctctatgatgccacgcccgtgaacgtgacgcccgtcacgacccagcccatgctccgcaccggctcccgcggcgatgccgtgcgtaagctccaggagatgctcaacgccaaggggtatacctgcggcaatgtggacggcatcttcggaagcaagacttacgcagcggtgttggcgttccagaaggccaacggtctgggtgcggacggcatcgtcggtcccctgacctggggtaagttggtctaacccagcgacaagaaatatcatcaccgcaaggaaagtgactgcacccgcagtcagagcgtaacgtttctctggagggtcatagctgagtaaatcaagcagctgccagagcagacatacgcaggcataattccacaacaggcaaaggacagcgcggcggacggtcaatagcaccgcccccgcgctgtctgcttttcaccacaggaaactctgtacgccattcacaacccatgagccatgccgccttcccacgcagaaggagaaaacactatgaaaaaaaatcactcgatttccgttttgaacctttgtcgccattatgctgatggggacggcgatcagtgccaccgcttgtcatcagaaagaggaatatcccagcgtacccgaagtgaccgagccacagcccaccggcgagatcatccccaccgtggaccggcaaaaggagctgaaggacgcaagaaagaaatacgccgacgccgtggcgtggctgtatatgcccggtaccgaggtggacgaccccgtggtgcaggcgaaggacaacgcttactacctgcaaaaggacgagaacgggaactacagcgaatggggctgctactacgcccactgtgacaaccgtttgagcagccggagcaagctggacaggaataccgtcatcttcggtcactctgccagcaactgtgacccggacgggcccaagctcacgaagctccatcggtatatggatgcggactatgtgaaggagaacccgtatgtctattcgtccatgatctccagcacgatcctgtctcaagcaatttctcttgttcgtccgtcatggtgacacgaagcttctctttattcctgcagatcagttcctgctgtttctttccgtgcagggcgaagtatcacacttggtctgcctaatattgctgtaccagaattcttcaaggattctcatatcgctatgatgaaaatcaactcgctttgagtgccaatcgaaaaatattcacgataaaattatgatgaaagtcaacagcgttttcctcgcagggcgcagatactttcccttacttctggtgcgctttcccttaaaacgcagctcgtattaagggaaagtccctattctttgtctatagcgatgcaaattctgcgccgcctatccttgcataaaggacttgcttaacctccccattagaggtacaatgcggcaaaccggggtaccggattacctgcccgcagcactccggcaaactataaaaaccgctttctgtcccctgtcacgagggtgttcagaaagcggttttttgaccacatatttgactacagacaggcgtggagtacgcggaaacagtggaaataagagtcttaaagagtatccgtaaacgagacgaaatggcaggaaagcggcacaaatcgtcataaggaattatgtaaaccgctttgggagcaggaggcccggggttcgagtccccgcactccgaccaaaaagctttgaaaagccgcctttttaggcggtttttctgcgttaaaagctcagtttttttattttgcgttgaccgcataagttgctgaaaaatatgggtcaaagtgcgaaaacagtaatgcggcggcaagttcaatttgccgccgttttctcatttgacccacaacctgacccacacaggcaaaactgagacaaccacacggaatttgggggcaaaaatcgccttaagatgttcagattgaaaatgcagtcgaaatagggtattattggataacggtaggccttgtgcctgcaaagccagccgtacggtgttcccgtgcggctttttgtatttcgcattccacatgcaaaacggagagatgctttaaagcagtatctccggtgatgaaacggcccgtgcgtccttgggtatctgctcggcggcagctgacagcggaccgctttaagatgaatatcgtcaactgtgccctgcttggtgcactctcctgtccatgccagaacggccagacgtggaacggctgacggacttttacgaatacccgggcggcagcggctatgaagggcggtttacccagtgcggtatctgcacactgatgcaggaactgggatcgtacgacctgacgctggctctgtgtcatccggactataccatgagtgagaccggcggcgcgacaagctttgtgcggacgtataccctggcctccggcggaccgtactgtgactgcggctataaaaaatgcgtgaaaaaagtgcccctaggctttcttggtgtccttgctgcccaggaccttaatgccggtggtgccgaacagcacaccggcggcaaacatggcaaatctcttcatggcagatcgctcctctatattttgcagcagttagatgtggctaaccgtcgcctgtaagatagcacagcacaggaaaaaagtaatacttttccgaaataaaattgccaaaaatactgcggaatgcagcgtgctttgcagggaaaacggcaagggcgccccacatagccgcaaagcccacaggccgtcggagacgtcaatgacacctccgacggcctgaagcaaaggcagcgagataaaggaaggaagttttttataaggaaggtttggtgggcgggagtagcgcccatgaagaagtttcttgcccgctgcccggggaaaaaagcaaggtcatgcccgcgccggcgcgtcacggcgtatggccagcagcaccgccgccgacagcggcaggcaggccgtcaggccccacagggggatgccgtagcctacctgctcgatgagccgccccagcaccgtgggcgcgatcagcgctgacagggatacgcccagcacgatgatggatgaggccgaagccgtccgagtagggaacgtctcgcagcaaaggatcaccagggccgggacctccgcaccctgcagcaggcccagcagcaccaaaagcacccgctggacggccaaagacggcgtcagcagcaaaaccgcaaacacgccggccgataaaaagcaggtgagcagatagaacgtccgcaccggcatacgcttatacaccagcggcgagagcatacggaccaccagtgcgcccaggaaaaacagggtgagcatggcgttggccgcgccgcctgccatgtggtgcacggtcttgtagtagttgggcagccagacggcgatgccgttctggaagcacagatacaggaaacagcacagcagatagagccatgcgcgcttgtcacgaaagatctccgccgggttggccacagacctgtcccgcagggccgtcatatcggcgtagggcgtgtggggcgtggcgcggcgggacaccgcccagaacaccgcgcccaacaccagcgccgccgcgcccagcaccagatacggtacggcaaaggtggcggggcggccgctgtcggtaagccatgtcaccagcaggggcgccagcatggcgcccagaccgtagaagccgtgaacgatgggcagcagcgtgctcttcttctcgggaaacacgtcggcgatgacgccgttcatcagcaggtcgatggtgatatagcccacaccgccgatcagcgcaaacaccagcagcagcccatagctgtcattgccgtacaggggcatggtgccaatggtcacaccggccacgcccaccagcaccgcgccggccaacaggccgtacagcttgtggagccgttcgccgaacaggcccagcagcaccgtcatcacgatgccgcccagggactgaatggtcatcacgaagccctggcggctttcggtgatgccgaaaaaggccatcatggactcggcgttggcgccaaaggcattgaaatagacgccgtacagcagaaacagagcgaagcacaggaccgccagcagcggcaggatacgctttgcgcctctcatgcccggctcctcatggcggccagggcatggaaggtctcccgcagcgcgggatattgccgcagatagagttggtagtagggctcataggcgcggccacattccgcatcggggtacagaacggtatccggcttgacaatggcatcgcaggcgctctccacggagggatacacaccggtgccaacaccggccagaatagccacgcccagcgccgggccctccagcgccgccttggcggtctggatggggcagccgtacacatcggccagcatttgacgccagaatgcgctccgcgcgccgccgccgcaggccatcatttcctccgtgggcacattcatgccacggagcacatccacgcactgacgctgggagtaggtaacgccctccagcacagcgcgaatcaggtggccgcggtcatggccgccggacaggccgataaacgcgccccgggccttctcgtccaacagcggggatcgctcgcccatcagatagggcaggaacaacaggccgtcggcgccgatgggggttttctcggccagggccgtcatcagctcgtaggggtccacgccctgtttggccgcctcggccacctcgccggcacagcaggtatcccgcagccaacgcagggactgacccgccgccagcgtgcagctcattaccgcccacttgccgggaacggcggagcagaaggtgtgtacgcggcccgccgggtcgatggaaacgctgtccgcatgggcaaagaccacgccggaggtgcccagcgtcgtaaaggcctttccgtagcggacagtaccggtgcccacagccgcggcagcgttgtcacccgcgccgcccaccacgggcgtaccctcggccaggccggtcagggcggcagctcccgccgtcaccgttccggtcacgtccacagactcgtacatccggcccagcagcgccgggtcgatgtccagcttgttcagtatctcgtcagaccactgccgccggggcacgtccagcaggttcatgccggaggcgtcggatacctcggtggcaaactggccggtgaggcagtagcgaatgtaatccttgggcagcaggatatgacggcaggccttgtagacctccggcagatgcttccgcacccacaggatcttcccggcggtaaagcccgccagggcggggttcgcggtgatggcgatgagtttctccgcgcccacagtctcggtgatctcgcggcactcctcgccggtgcggccatcgcaccacaggatgctgcggtgcagcacctctcccctctcgtccagcatcaccagaccgtgcatctgcccggagatgcctacaccggcaacatcggcggcggccacaccacttttgtgcagcacggcctgcaccgtctcccgcacagcacgccaccagtcggacggctcctgctcagcccagccgttctggggctggtagagggggtattccaccgtgtgggcggccatggccgtaccgtcactgcggaacagcaccgtcttggtgccggaggtgcccaggtcgatacccagcaaatattccttcatagccttgcgcctcctttaggcagggccgcccttccgggcggcccgcaatatgtcatttctcagtggaacagcacccggttgaccacagattccagatactcctgacggccgctgggcacatcgaagctcttgaggccctcggcgtaatccgccagagactccagggtcatctcaccatccacgatcttcttgcccacgccgctgtcatagctgctgtagcgttccttgacgaactggtccagacggccatccgctttcagctccagcgccttgcggagacccagggcaaaggtgtccataccggagatataggccagcaggatgtcctcgaaggtgttggactggcgtctggctttggcgtcaaagttcaggccgccgttggtaaagccgccggcgcggaggacctccatcatacagtaggtggcgctgtacacattggcggggaactggtcggtatcccagcccagcagatagtctccctcgttggcgtcgatggagccaaagctgccgttgacgatagcggtacgcagctcatgctcgaaggtatggcccgccagggtggcgtggttggcctcgatgttcatcttgaaatccgccgtcaggtcgtacttccgcaggaagttcatgcaggtggccacgtcgaagtcatactggtgctttgtaggctccttcggcttgggctccagatagaaatcgccggtaaagccgatcttgcggccgtagtcacgggccatacgcaggaagcgggccatgttgtcaagctccagccccatgtcggtgttcagcagggtgtcgtagccctcgcggccaccccagaacacatatccggtggcgcccagcttcaccgcggcatccaggcaggcccggactttagcggcggcggcggcaaacacatcggcgcagcaggaggtggctgcaccggccataaacttcttgtcgccgaagttgttggcggtgacccacaggcacttcttgccggtcttcttctgcagctcgtacagataatccaccatcacgcgaaaattggcgatgctctcggccagggtagcgccctccggggcgatgtccacgtcatggaagcagtagtagtcgatgttcagcttttccatcagctcgaaggcgaagtccgctttggcgcggaacttggccatggggtccgtctggcccatggacttatccatggtaccggagccgaacatatccacgccctcggcgtcgatggtgtgccagtagctcagtgcgaacttcagatgctcacgcattttcttgccggcgatgacctcgtccgggtcataccaacggaaggtaaaggggtcggtcccctggggatcgtagacgaccttactcacatcagcgtactttttcatgttattacacctccgaagtatgtttcgtttttacgcgggaacggatcatgggcaccaccagctggatgataacggccaccagcaaaatcgagcccttgatggtatcgttgatcagggcgtccacctgcagggaggcgatgatcttgtcgatgatggtatagctcatggcgccgaacagaacgcccagcagcttgcccttgccgccgctcatgctgataccgccgatgaccaccgcggcgatggcgtacatctcgttgctcttacccagggtagccgggtcgacggagccgttcatggccagccacaggaaagcgctcaggccggtgagtatgccggtaatgacatagaccgccacacgggtacggttgacgttgataccggccagggctgcggcgcgctcattgctgcccagggcatagacggtcttgccgaacttggtgcaggtggatatgaacaccatgatgaccgtgaccagcagcagcacgatgcccaccacgggaacggtggcgatcttcagctggccgaagccgtagaagctggcatagtggtccagggtaccggtcatattgaagatggaggacccggtagtccgcaggtagtactgagccaccgaacggaagatcagcatggtggcaagcgtcacgatgaacgcgggcattttcaccaggccgatgagcacaccgttgaacaggccgcacaagccgccggccaccagggcgaacagcagcgtcaggagcacgctgtccgtggcattgaacaccaccacggagaagctgcccaccagcgccagcatggagcccacggacaggtcgatgccgccggtgatgatgaccaggcccatgccgaaggccatgatgcccaccacagcggagtgccgcaggatgttcatcacgccactccatgtggtcgcgccgtggttaataaacagataggcgatgaagatcgccagtgcgatgaggataaagctgtaattattgatccaggcggcaatgcccttcttgttcagccccggttttttggcctgggccttcagttccgtgttctgactcatacgtttacctctccctccgttgcgtgtatcacattggtcgcatacagcatgactctctcctccgtgatctcctcacggggcaggatcgtctggatatgcccgtggtagaacaccacacagcgatccgcgatcttctgtatctccggtatctccagggtgttgaccaagatggtcttgcccttctcggccagttccaggatcagcttgtagatctccgccttggcgcccacgtcgataccctgggtggggttatccatgataaggatatccgcctcggtggtgagccaccggcccaggatcaccttctgctggttgccgccggacagtgacaggatcaggtcgtcatggctgttggccttgatgttcagcatatcccgcattctgttgtactgcgccacctctttccgcccacggatcagctggtgattggcagaaagcgtgtgttcggagatgtagttgttctccagcaacgtgaaatccgggatgacggagttttccttgcggttggcggggatcatgccgatcctgtggcacatggcgttatgtatgccgccatggcgcagcggctcgccgttgacatacaccgtgcccgagcggatgggaatcgcgccgaaaatcgcctgcatcatctcgctgacgccggcgcccttcaggcccgtcagaccgatgatctcgcccttacgcacctccaggtccacgttctcgaacccttcgccgctgaggtgctccagcttcagcgccacatcacccagctggcggggctggtacaccgaggcctcggagtagctgctgcccaccatcaggcgggtgacagcctccggcgtggtgtcggcaatattgccggactgaataaagcatccattccgcaggaccgtgtagcggtccgcgatggtaaatatctcgttcattttgtgggagatgaagatgaaggacttgccctgctccttcaatcgccgcacgatactgaacaggtgctcgatctccgcgttgttcagcgcggtggtcggctcgtccagaataaagagcttcgcattggcgtgaagcgcctttgcgatctccagcagctgctttttgctggtctccagctcgtctaccagggcgttggggtcgatatccacgcccaggtcgctcatcagctggcgcgtctgctccagcatggcccgcttatccagcgtgcccagcttggtcagcagttctttgcgaagaaaaatgttctcgtacaccttcagatcgttaaacaggttcaactcctggtgtacaaaggcgatacctgcctgttctgtccgtttgacggaaatgtcatgcatttgctccccgtcaaactcgatctcgccctcatcccgctgatgcacacccgccaggatgttcatcaatgtggacttaccggcgccgttctctcccagcagtgcgtgtacttccccgcgctccacggaaaaatcaacgtgcgaaagcacttccacaccggagaatgatttggtgatattggtcattttcagcaattccatgccgcacgcctctctttgctgtttgataagatcccttctgcgaagggggaggtgccccgcgggcgccgaagcgcccgcgaagccctcggaaacgactttacttacttggagacagcgtcaccgaagccctggaagtcgttgacgttggtagcatccaccacggacacggcgatgacgtgatcctgggtgacggtaccgccctcgatgtgggtgaccatgtcatccacggcagccttgatcatcgcgggatcgtaagtaacggagaacagatcggccagcttggcaacctcagcggtgtaatccttctgatggatgcccttcagcacggagtagatctcgttcagaccggaggaggtgcccagatgcacaccggcgttcaggaaggcgtccttcttctcggcgtcgatctcggagctcttcagcgcctccaggatgcccatggcgatctcgtcgtcgtgggtgaagatccacttggtggcggtgatgtcctcaacagtgctggcatccagccagttgatgaacagctccttgcccttgctgcggctccagccggtgtagtcggtggactggatggcagcgatctgctcctcggtccagccattctccttcagcacgctgaagaagccgtcgttacgcatggtgggaacggaagagttgtcaccgggcatgatgaggaccttgtcgccagccttcatgccgtcggcgatgaagcgcttggcggtctcggcgccgatgccgttgttatcgcccttgacgcaggcaacagcagtggaagcagcggagtcgatgatacggtcgaacatcacataggggatgccgctggtggccagcttggccatggtgttctccagggtgttgtcctgaggcagaatgaccacatagtcagcggtcttgttctcgatcaggtcctccacctgctggatctggttggcggcgtcggaagaggtgatgacggtggcggcatacttgccggcgtcattcagctcctgcgccttctcctgcgcataggtcatcacagcgccggtccagccgtggtcggcattggggaccaggatcgcgatgcgattacccgtggcagcatcgttgtccttgttggcgtcatcgtccttcttctcgccgcaggcgacaagagacagggccatgaccagcgcaaggatcagtgccagtactttcttcatggttgtttcctcctaaaaattttttatagatacggacaaagtccgcctataacgtgttcttacagctccacccaggcagagtccttggctgcggagtcgatgaccgcgtgaatgaacttcacgccgttgaggccgtcggtgacggtgggatagtcgaaagagccgtcgttggccgtaccgcccgccttcaccgccagaatggcgctgatgatgttcttgtagatgttggcaaaggcgacgatcagtccctcggggtggccggaggggatgcggctgtacgcgccggccttctcggtgatataaccggtaccgcgggacagggtctccgtgggcttgcccttgggggtgtacttcagataatcgggatagtgctgctcccactccagtgcaccctcgctgccgtagatgcggatggtcaggccgttgagcttgcccgccgcgatctgggaacaccagtacgcgccgttgacgccgttttcgtactcgacgagcatattggcgttcaggtccagctccttgccgtaacggttcacggtggcggccagacgcttgatgttcaggccggtcaggtagtggacggagttctcgatgtgggtgccgatgtcgcccacacagttggagataccggacaccgccggatcggcgcgccagacggacagcttagtggtgccctcgccggggacgcccaactcatcgatgagccactcctggacatactccgcattgacggcggcgatcttgccgatcttgccctcggcgatcatctcgcgggccaccttcatcatggtgtagccggaataggtgtaggtgacgccgaaaaccaggtttttctccttggccagggccaccagctcctgcgcctgttccacggtaaagcacagaggcttttcgcacaccacatggatgccgtgctgcaggaagcacttggccacgtcgtagtgggtgttgttcggggtggtgatgctgacgaaatcgataccgtcgggacgcctgctctccgcctcggccatggcctcatagctggggtacacgcggctcatgtccagggagtaggtctcgccggtctcacggttcttctccgcattggtggagaagcagcccgccaccagctgtgcgcgggggtcaaaggcgatggctttgcgatgcacctcgccgataaaggcgttcatgtggccaccgaccatgccgtaacggatctgaatacccatattgtcctccttgtcgcgtttcagttggcgatagcgtcgtcaaacttcacatcggacttcttgaagtccaccttcttcacgaaagcggccgcctcggtagcgccctcgatacggtccataccgctgtcctcccattccacggacagagggccgtcgtaaccggcggcgttcagcacgcggatgatctcctcgaagttcacgtcaccatgacccagggagcggaagttccagccgcggcgcaggtcgccgaaatcgatgtgggagcccagcagaccgctgcggccatccagagtcaccgccgcatccttcatatggacgtggtacacgcggtccataaagtcgcgcaggaacagatggggcgtcacgccctgccacagcaggtggctggggtcgaagttcaggccgaactcggggcggtcggcaaacttcttcagcagcttctcggtggagtagtagtcgaaagcgatctcgccgggatggacctccagggcgaacttgatgccgttggccttgaactcatccaggataggggaccacaggcgcacgatctcgtcgtagccgttctcgaccatctcctcggtggtctgggggaaggaatacagccacttccagatgggagagccggtgaagcccgtgaccacatagcagcccagcttcttggccaccacgggggccttcttcatggtgtcgatcgcccaggcgcggatctcctccggcttgtcggccagcgccgcgggagcaaagttgttcagccggggatcgggagcgtcgcccacacactggccgatgatgtggcaggccagagccttgcagatcaggttgttcttcgccagggtctccttgatccaggccacatagctgtcatcgctgtatgcacgatcaatgtcgatgccattgccccagcaggcgacctccaggccgtcatagcccatcttggacgccagcgcacacagttcatcgaagggcaggtccgcccactggcaggtgcaaagagttaccggtctgtttcccatgatacattcctcctgttaaaaagttaaatcatcatcggcctgtgccgatcggatcacaaacttactgcgagtgccgcacacgcacacggttgtgggtatacaccacgccggcggcgggccgccgtccggtgtggatatagtcgaacagcacacgcaccgcctcgtccccctgggcgaagggctcctgggtcacagtggcggcgatgtgcccttcctccatataccgcagcacggtctccgtcccgtccaccgccagcacgcgaatattctttccgctttccaggatggcccgcataccgccgtcgataccggcggcggcaaagcacaccatatccggcgtgtggcccgctagataggcccgcagcacctgataggagacatcgtcgtcgtcctgattttccagcacggcgtccaccgtgatctccggcgtgccctccagtgcggtccgcagaccgcgcacgcggtccatatggccgcggacattggtgctgccgataacagccgccacgcggccccggccattgagcatgagctgcaccagatctccggtgatcataccgctgttgtagtagtcgcagccgacaaaggccacacggtcgacatcgatatcggtgttgactgtgaccaccggtatgggcaatgactgcaggtacaccgcgacctcgggcacatccagcggcatgaccgccagcgcgtccacgccctcggccaccagccggcgcatggcctgcagctgcgtggcggcgtcgtagcccttgatctcgcggatggtaagggtggtgccgtagctggagagttttctggcgcggctctgtgcgccgcggagcacctcgtcaaaaaagggattgccgacggagggtatgaccatgccgatgtgggtgcgctgacgggagcgaataagcgcctgggccagctggttgggctggtagcgctcacgctcggcaatgtccaatatacgcttggccagctcgggatttacgttgccgcggccgttaagtacccggtcgacggtgccgcggctggtgcccgctttttcagcgatctgcttgatggtcacgcgtccgcttctcctctccgaaatttgtatcgcccttggcgatgtgtcatttgtgctcgagcacgaattgactgtgctcgagcacagtttcaaaataccatctcttttgtgatctgtcaacggaaaagggccggcatggctctatttctgtagagttgcctaaacacggcgaaaaacttttgttgtttttcccagtagacatttcggaattccctgttacccgcaacgctttgtgccaaacattccaaaccaataaggtggctgccaaacagcaaaaggggccaccatacagtggtcccttttatacggaacaagccgaacggctcccaggtgcgtgcctgggagccgttcggtgcaagggggaggaaaaggagtaaagggagaaaacaagctatttggtgcagaccggcaggaactggccgaagcagtcgggcaggacctgaccgtcacgcatagtggtgcggccgcggaggatggtctcgaccacccggccctggaaggacataccgtcatagggggaccatttggctttagagtacatcttctcctgacggaaggtgtaggccgcggacatatccacaatggccaagtcggcatcggctccggggcgaataacgcccttgcggggatagaggccgaaggtacgggccgcattggcggaggtgatcgccgccacgcggggcagcgtcagcaggccgcggtggacagcggtgagcagcacaggagaaagaccctcgataccgctgattccggcgggggcatcccagaaggaacggtgcttttcctcgcaggtgtggggcgcgtgatctgagcagacccagtccagggtaccatccgcaaggccctgccagactgcctggcgatctgcggcggtacggatgagagggtaagtcttcatcaccgcaccgcagcggcgggcgtcgcggtcggtgaaggtcaggtaatgggtacaggtctcggcggtgacatccacgccgtcggccttggcgcggcggaggtgctccacgccgtcgcctacacccacatggaggacgtgcaggggcatggagagctccttggccatgtcgatggcggtgtcgataatggaggtctcgcagctgacggggcgggtacgcagcaatgcggcgtagtcctgcgcgccggcggcaagggcctcctgcgtcagggcccgaacaatggagaaattctctgcgtggatgcccaggcgtttgccggtggccttcacggcgcggaacaggcgatagatctggccgtcgtccgggggcgggaggacgttgtccatgccctcacggtagttgtagatcaggctgttgtcccggtggtccaccgcgtagccccagaagaatttgaaggccacgcagccggcctccgccaaagcgggcaggctggcaagattggcatcgcccaaagccaggccccagacgcagaaatccgcatgggccttgggctggatgaccgagacaagatcgcggagagactccgccgagtggatggtaggggtgcagttgggcatttcgaacacggtggtaataccggtggcggcagccgccgcggtggaggaacggaagtcctccttctcacctgtggccagacggccgtcgcgggagtgaacgtgggtctcgatcaggccgggcaggatatagcggccagaagcgtcggtggcttcgccgacggtgccgggcaggcgctcggacgtgacggcggcgacccggccatcacggatgtagatatcggcacgctgcataccgtcatcgttgaccaccgtgccgttgtagatgactctgtcccagtccataaatgcctcctctgatatgtatactgtatacacttagtcttcaagagaagcccccatgacaggtcacaggggtctcgtgcaggcggtacattccgtcatacaggcggtagatatccgtcatgcagatggtacatatccgtcatgcgggcgatacatatccgccatgcaaatggtacatatccgtcatgcagatggggtctgtgcgtcagtcctccttgccgtagcgctggagggctgcctcgtgaacgttagcggtatgggcggtgagcacccgacggaggcgatccgcatcacgggcccgcagggacgccacgatctcctcgtgctccgccaacgcacggcggcggcgttcgtcatcggacagcacgctctcgcggaagcgggcgtgctccgggttctgaaacgacgtggtggcgctgtagctttcgatctggtccaggagcttgatgagcaagggcatattgctgctctgggtcaacaggccgttgaattcgtccaggtggcggaaatacgcaccgacgtcatgcttgtccagcgcctcggcacagccgcggttgtcggcctccatggcgtccagctgcgcgtcggtgatgttccgcaccacagcatccacgctgagcagctgcagggcggaacggatggtatagacctcgtccacctcggcacgggtcagcctgggccgggccacggcgcccttacggggctcgtagaccaccagcccctcacgctccagcatacggatggcttcgcgcacgggggtgcggctgacgcggaaaatatcggcgtattttgtttcaacaatgcgctcatccggcgcgatatcgccgttgatgatggcgtttttcagctggctatatatcgtctcgcgctggggattggcggggtccaccggtgtgaaggctgtcatctctctctgcccccttctttttataccgcagcaggcggctctacacacactatacccgctgctgcggggaaaagcaagcaaaaccggcaaattttgctgattttccctctcctgccggggcttggacgcagtgcagtctctcttacatgtgcatgggatactgtatacaaaatacatggtaacatattcctttcccttttgcaaggggttttcagatgcgcggcaaaaaaaagaaagccctttcgggctttctttttttgctctcagtgacgctttttagcggtccaggccatgccggtcatagacagcaccgccgtcacggcgtagatgcccacgcccgcgtcgaaggtctgggggctgctgctcttgccgccgatggtaaagtccatgctggtgttgcccgccgtggacaggatggtgatggtgtgcttgcccgccgccagcgtcttgaggtacgcggccttcaagtacaccacggtggagccctcttcagcggtgtagttggacttggcaagggtcttgccgtccacctggacgccctggaaggtgctgaacgctgcggtggaacggaacaccaggccgtagtcgccgccgggatagtctgtggcggacttgttggtgccgttcagctcagcggtgatgccgggggcggaggggtagtaatagtagccgccggtctttgcggggacggtgtagggcgcgtcacccttcttgacttccttcgttccgttgaccgttactttaccctcaccggtgtttttaacggtcacgccggagttaacaccggtcaactgtacatcaccattcttaatgatgatggtctttacgccttcagtggtcgctgccgtctggatataatccgtaccatagttgtatatggtcttaccagactcatcagtcacttctgccatcgccagatttccatcaggagccgcccaacttgcatcgctttctgcaataggcatattatcatagtggccgcctgtcagcttcaacttaccctcaggcgaaccctggcgcccatagatggtcgttaccgtcgttccgttggattgtacagtattaccatcaactaccgccttaaccacaataccaccagtttttccgttcgtctccgtaccggctactcccgttgtaccaaacaaagcgcctgccttgttgccagaactcccggtagatgtcacttcattcacagtagcagaggtatccagcacctccaccaacgtccaagcgtcgccagtagcatgacctatcagcgcaccaacagagcctttacctgtcaatgtgctgccgcttaccgtgcaccccgtgaacttgactgtttggaacaccggtccatcactgccgctataaccagcagaatatccgacaaaaccacccgtccaatgtccgccttccacatgagaatctaccaaatggcaatttgagaacacaacctctgtcgttgccccagcgctgccaagaaatgcacctactcctttgctttctgttgtatcatctatttcaactttgatattcgcgttcgcaatcgtcagatctttaacgatcagtgcacacttacccgcccatgatcccgaaaacagcatattactcagaccggtgattttattgccattcccgttcactgtcacaacaccggttccagcctttccgctctttccatagccgttgatgtacccaggctcccaactccctgtgatcgtaatatcatttttaatattgatgatcatatttgcgccaaagcaatccgttgccttaactgctgcctgcaattgctcttggctcgtcacatcaacggaataagtatccatcccattggcgcctttttcacctttaacaaaaccgttatattccgtcgcccagctcacgctgcacaggctcagcgccatgaccagcgccagaatagctgctaacaatttcttcatgtctcataccccgtttgttttagatttccgcaggcgcactcgttttaatggttattaaaacgcaaatgcagaggtacctctgcggatagtcagattatagcacagctgcattaatttgtccagcctttttatggaaattttacacattttttctgttaccgggaatggaaaacgggagaatttgacagaaaatgggaattgggggtgtttcgccgccgcgggcggggcggggatgatttgtcataattgtcaaaaaagtggggtttatttttgtgctaagggcagaaatgctgcacttctattgacggcggggtgaaatgcgagtaaaatatgtacacaaagaatactgtatacagtatccaatccgaatacacgcagaaacagcgtctgcgctgtataccatgagcgacggcccctgcccgggacacagtatgccggggcagacagatacagccggttcggacatgggcggataacgccgggcggcagaagcggaggacggcacatggagaacttctcattatatataaacggcgtgctccgcacggtatgcgtgccgccccagtggacgctgctgcgggtactgcgggagacgctgggcctgaccggcgcgaaaaacggatgctcctccggcgactgcggcgcctgccgcgtgatactggacggcacggcggtgaacgcctgcaaggtacctattaaggatgcggcgggacatcgggtggagaccatagaggggctgagccggaacggacagctgcaccccatacagcaggcgtttatcgactgcggagccgtccagtgcggcttctgcacgccgggaatggtgatgagcgccaaggcactgctggacaagacgctgcaccccagtgacgaggagatacgggaggcgctggcaccgaatctgtgccgctgtaccggctactacaagatcgaggaggccgtccgggaggcggcgcggcggctggaggcgcaggaccggtgaaggagctgacgtacatcggaaagagctacccggtgcaggatgcggcggccaaggcaacaggggagctgctgtatgtggacgacatgaccgtgccgcggatgctgtacgccaaggcgcttttctcgccgatagcacacgcgcggatcaagcgcatcgacaccacagcggcggaggcgctgcccggcgtgtgggcagtggctacctatcagaacacaccgcagacgcggttcaacagcaccacgcggttttatatgcaggcaccggcacctatcgagacggagcgtatttttgacgacacggtgcgctttgtgggcgaccgggtggcggcggtggcggcagagacagaggatatcgcccaggcggccatcgacctgatcgatgtggaatacgagccgctgccggtggtgacggatccgctggaagccatgcgggaggacgcctatcccctgcacggcagcagcaacatcgcgctgcggatcgagaaaaccacgggagacgtggcgaagggttttcaggaggcggaccgggtgtttgaagacacctaccgcacgccggcggtgcaccactgcgccatcgagccccacaccgccatcgcggaggtggacgcgcagggacggctgaccgtcaccgcaccgtatcagaacacctttggcgaacggatcgtattgagccggatattcggcctgccgctgagcaaggtgcgggtggtaagccccaccatgggcggcgcattcggcggaaagatggagtcctcggtggagctgatccccgcagcgctggcgatgctgtgccgcaggccggtgaaattcaccgccacacggcgggagtgcatggtatccacgcgggtgcggcacgccagcgtcatcacggtgaagaccggtgtgaaaaacgacggcaccatcgtggcacaggagatcacggccatcaccaacaccggagcatatgcctccagcgcagggaacgtgatcggcgccatgagcgccaaggtattcaagggctacaaaacaccgaatatgcgctttgtgggcatacccgtatataccaacacgccggtggcgggggccatgcggggctacggctcgccgcaggtattctttgccatggaacggcagctgtataagatcgccggcgcgctgggcatggactacacggagctgcagatgaaaaatctggtagatccggaggacagcgacctgttcgcggggcaccccatcggcaacccccggcccaaggactgcgtgcgccgggccatggcactgcggcagaactggccggacatggacgatgaggacggaaagtacctcatcggcgagggctgggccatgggactgcacggcagcggggccttcggctcgcagatcgaccagaactgcatggtggtcaagatgaacgatgacggcacctgtgtgctgcactccggcacccacgatatgggcaacggacagctgatggtgcagatacaggtcgtggcggagacgctgggcatcccaccggaacaggtggcctgcgtggcctcggacacggatgtgtgcgggtggaacctgggcgacttttccagccggggcgtgtatgtcagctgcggcgcggtgcagaaggccgcggaggacgcggcggtacagctgcggtgcgccgctgccggactgttgggcggccaggcggaggacatctctctgcacgacggacgggcgtggctgccggagggcagcagcgcctcgctggcggaggtaatgaactacgcccagagcgtacaaaagcatgagatattcggtgtggccacccacgcatcggcacacacccctgggtcctacggcgtacatatggcgcgggtaaaggtggaaaaggccaccggcgcggtgacggtgacggactacatcgctatacatgatgtgggacgggtgatgaaccggatgggcatcgagggacagctggagggcggcatacagatgggtctgggctacgcgctccgggaggaactggcctttgacgcggcaggacagctgcgagacagcagcctgcacagttaccggcccttccgggccacggaaatgccccgtttgcagacggattttatcgaagagggcgaacctaccgggccctacggcgccaagagcatttcggagtgcgcggtggtgcccagcgcaccggccatcatcaatgcggtatgcgatgccacgggactggacatccatgatctgccctaccgccccgtaaaggcagagggcggcatacggcggctgcacaccacggagggctgcgtattctgcggcctgtgcgcgaagaaatgcccctatggcgcgctgtccgtggaccggcagaccaagcagtggcgggtatccgaccggcggtgccgggaatgcggcctgtgtgcggcagcctgtccaaagcattgcctttccttagacaatagcgtcgtatacatgacacatgaacgttcttattgtgaaatgtatcatttcaacaaatagcagtgatgtgaaaccgctatggcccggttattgactttgcccgggccgacgtgtaaactgtaacatcatttttgcggcggctggtgttccgccgcctctcccctcccctggcgcggaaaaaaatcgtggtgtacactgtaatgtatactgtacacagtagacggacacagtctccctcatccatgccagcaggggcgaaacaccgtggacaacatcatacgcaacagcgcggcccgcagacgacggacggcgcgatagccacagacagaacggaaggagcgacagtcatatggcacattacaacgatatgcgggaatttctggaggagctgaagaagcggggcgacctgatggtcattgacaagaaggtcagcccggtacacgagatatgcgcctttacgcgcaaggcatcggacatgggtggtccggcgctgctcttcaccaatgtggagggctacgatatgccggtgctgtccggcctgtacggcacccgcgagagagtgcatctggcactgggcctgggcgacgatacaaagagcgttattaaggaatacgtggctcacgagaacaagtttatcccgccggtaacggtgggtgacgacgaggctcccgtgcacgaggtggtgctgaccggcgacgcggtggacctgtacaagctgcccatcctgacgaacttcgagaaggacctggggccgtatatcaccgccggcgtgcagatggccaacgaccccatcaccggtgtgcggaactcctccatgcaccggatgctgctgctggacaagaaccacatgacctgctttgcccccaagggacggcatctgggtaccattatcgaacgcaacgaggacaacggaaagggcacggagatcgccacggtcatcggcggcgaccccatcatcgccatcgcgtcacagtgccggccggcactgggcaccgatgagatgggcatggccggcggcctgcggggcgaggctgtgaagatggtcaagtgcaagaccatcgacgtagaggtgcctgccaccgcggagatcgttatcgagggacgcaccctgcccggtctgcgggaggacgacggccccttcggtgagtatcccggcacgtacagcgaggtacgcaaagccccggtggtggagatcaccgccatcaccatgcggaaggacgccattttccagaatgcctataccggtatgcccatgacggaaaaccactggatgatggatctggcggccacagcgctggcttaccgcgaggcgtacaagatctgcccggacattcacgacatctgcctgacctccggcggcaccagccgccaccactgcgtggtgtccatcaagaagcgccatccctatgagccgcggaatgtgatgaccgcccttctggcggccaacatcggcatcaagctgtgtgtggtggtggacgaggatatcgacgtacatgatatgcagcaggtggaatgggctatcaacacccgtatgcaggcggaccgggatgtgatgatactgccggtgatgtacagccccacgctggacccctccgcgccgtatccccgtgcgtcgtccaagatgggcatcgacgccaccgcgccgctggaggacaaggaggcgttcgcccctgtgttcacacccggacaggacgcaccgtatatcgaggaaatgctgcgggactttatggataagcggcggaaataagccgcaggaggcggaatatgtctgacaggactcgtgaaatggccaccgtacgggaaaacagccgtattctggacggctactataaaatgacactccacgcaccggtgatcgcacagcgctgccggccgggacaattcgtgtttatccgggtgggcagcggcaccgcaccgctgctgcggcggcccatcagcatctgcgaagccgacagcatcggcggcacgctgacactgctctatcgggtggtgggcacaggcaccgacctgctgtccgccgtgcgggcgggccaagccctggacgtgatgggccccatcggcacgccgttccccgtggagggtgagcaggcgatactggtagccggcggcatgggggcggcgcccctgtgtatgctggcccgggcactgcatgatgcaggatcggctgtgaccgtgtatctgggctgccgcgacgcggcccatgacctgtgcggaaagacgctgcggacctacgggacagtacacaccgcctatgagagcgaaggccgcctggtaacggatatcctgccggaaacagcggcaggcgtcgtgtacgcctgcgggccgacggccatgctggctaaggtgcagcagtgggccgcacaaaacggcgcggagggctatgtgtctctggaggaacgcatggcctgcggcatcggcgcgtgctccggctgcggcttccccacgcggaaagccgacggcggcgtgctgtacaaaaaagtctgcgtggacggaccggtattcccgatgggtgaggtgatctttcatggataacatcacagtgggcggcgtgacgctgcattcgccgctgctgaacgcggcgggcacgatgggcttcggctcctcctatgcggactatatcgacctgcaccgtctgggcgggctggtgacacgcacgatgaccgtcaaaccccggcgtggcgcggaggcgccccggctatgggagacgccctcggggctgctgaactgcgtggggatgcaaaaccccggatatgagaaattcacgcaggtattttacaagggactggtgggctatgacgtgcccattattgccagcgtcaccggcacaccggaggaaatacggcgtatggcggacgcattggcggagctgccggcagtggccggcgtggaggtgaacctccactgcacctacgaggaataccgggcactgggaagcaaggcgtatctggagcagtgcgcgcagcgcatccgtgccgccgcagacggacggctgccggtgtgggcgaagctgtcgccctgcgccggagacatcgtagatgcggcgcggacggcacaggacgccggggcgcaggcggtggtatgcgccaacacctattggggcatggccctgcaggcggacggcagctcacggctgggcagcatggtgggcggactgtccggcccggccatacggcctctgtccgtgttccagacatggcgggtggcccaggaggtcgctgtcgacgtggtgggctgcggcggtatcgtgtgcgccgcggacgtaaaggaatacatggccgccggcgcaaaggccgtggagatcggcactgccaacttcacagagccggagacgatcatacggatcacagaggcactgtaacgcccgcggggcgggcaaaatgtacgaaacagacgggaggaatggacatggtggcagtgggcatcagcggtgcgacgggctgtatatacgggatccggctgctggaggcactgcgggcgctgggacaggagacagagctgatactcagcgactggggcgcagagaccatacggctggaaacggatctcaccgtggagcaggtcaaggcgctggctgaccgggtatacgacaaccgcaatatggccgcacaggcggccagcggttccagctgcgcggacgccatggtcatcgccccatgcagcatgaagaccctggcgggcatcgctatgggctatgacgacagcctgctggtgcgggcggcagatgtgatgctgaaggagcggcggcggctgatactgctgacgcgggaaacaccgctgaatttgagccacatccgcaatatggagacggtaacgctgatgggcggcattatcctgccgccggtaccggccttttacagccggccgcagacggtggacgacatcgtggatcagacagtcagccggacgctgcggctgctgggtctggacggcggggaaaggttcaggtggaacggaaatggctgagcgtgtggtggagcgaacactgagcgacggcggactgtccatacactaccggctggaacggctgggcggcgacctgctgctgaccgtgaccggcggggcggcccacgtaggctgcgtcgtactggccacacaccggcagagcctgacaggcagcggcgcggacagcgccgacagcagcgttctcaatcgcagcgggcacaaggacgaattcttgctgcgggcgctggcagaacggctcagcgccgtggccggctgtgccgtggccgccgtgggcggcgtgcattacgacgggctggaccagcagggactgcggtccgccgcccatattgaacagcaagcgctggcacaggcagaggactgggcggcggaattgctgccgtaacgggaaacaagaaacacagaggggaggtatgccgctgtggcacagcgcgaacaggacatcctgcgggtggacgcccgggacaaggtgaccgggcggacgaaatacgcggcggacctcgccttcgacggtatactgtacacaaaatcagtgcacacggaccttccccatgggaagctgctggcggtgcataccgcggcggcactggcggcggagggcgtggccggtgtgtacaccgcccgggacataccgggccgaaatgtgggcgacaatgagaagcccatcatggtttatgacaccatacggagccggggcgattgcatcgccgtggtcgcggccgtctcacaggaggcggccgaccgggcggcgcggctggtcacctatgacgcccagcccatgcccgcggtattcgacccggaggaagcactgctgccggacgcgcccaagctgtacgacgacgggaacctgatactggagcaccgcgtccgcaaggggcgggcggcaaagggctttgacgaggcggacatcattgtggaacaggaattccgcacccaacgggtgatccccggggccatcgagccggagagcgtggtggtgtcgcctcaggacggagagctgcgggtctactgcccgtgcaaggcacccttcaacatccggcgtatcgtggcggcggcctgcggtctgcccatgagcgctgtacgggtgacacagcccggtatgggcgggtccttcggcggcaaggatgacgatgccggggctatggccgcaagagccgctatcgcggcgctgcacaccgggcggccctgccgcatgacatggcgcagcagcgagacgctgctggagggcgtaaagcggcatccctttcacatctattacaaggccggcgcaaagcgggacggcatactgaccgccattgaggtgcggggctttgtggacggcggcgcatacctgtccaagagcaagaccaccacatggcgcagcggtatcgaagccacagggccctatcgggtggaacacgtggacgtgtgcatgaaagcggcctataccaacaactgctatgccggcagtgtgcgtggcttcggctcgccgcagatcgacttcgccaccgaatctgtgatggacgagctggcacagcagctgggcatgacgccctgggccttccgggagaaaaacctactgcgggacggcgacatatccggctccggccagcccatgcgcgacgtgagcgcaggtgcgtgcctggaacgcctgcggcgggaattcggcgaggacctgcggccctttgtccggaacggaaagctggtgggcaggggcatcgcctgcctgtaccggggcgagtcctacggcgcgggcacaccggtgcaggacacctccggcgtgaccatcgtattaaacgcggacggcagtctgaacgtgagcaccgggctgagcgaggtgggccagggcggtcacacgctgctgacagccattatcggccgggagctggggcttccgccggaacgcatacacatcgcgccggcggacacggactactgtgtggattccgggtccaccgccgcctcacgggggaccatcaccgcgggcaacgccgcctggctggcagcacaggaggccaagcagcagatcaacaccgcactgtgggaataccgggggttcgacggacccatcgtatatgaggacgggctggtccgctgcggtgacgagcagatgaccttcaccgaggcggtaggtgtcctgcggaataccggacgggatgtgcgcgcccacggctggtggaccgcccccaagacattctgggacagagagaaatgccggggcagcaattatatgtcctacgcctatggcgcctgcggtgcggaggtagagatagaccccatcaccggaaagaccgacgtaactgactttgtggccgtacacgacatgggccgcatcattaaccacgctgccacggtgggacaagtaggcggtggtgtatccatgggcgtaggctacgccttgacggaaaatgccgacacaccgggcggcgtgacacgcgccgctgatctggacagctatctgctgcccacagcactggatatgtgtcccgtgcggacggtgctgctggaggaaggcgccggcgttccgccgctgctggtacacggcattggcgaaccggccacctctatcgtggcgccggccatcaccaacgctatgtccgcggcgctgggcgcacggatagacaccctgccggcggacctggaaacggtacgggccatactggatgagaaaaagaggtagctatgtttctgcaagcgggcagccccgcggaactgcgggcctatatggcacaataccccgacagccggtgcattgccggcggcacggatatcatgccggtgcagaaccgggaaaatgaccatgaggcggtgttcatcgatatatccggcgcagcggcgctgcaccggatcgtggcggaggacggcgtgctgtccgtcggggcagcggcgaccttcgccgagatagaacgaaacgcgctgctgcggcagtacgcgccggcgctgtgccttgccgcatcacaggtggggtcccctcagatacgaaatctgggcaccatcggcggcaatgtggcacatgggagccccgcagcggacaccctgccggtgctggccatgctggacgcggaggtgcggctgtacagcgccacggagggcacctgccgggacataccggtggataccttcatcaccggaccgggacagaccctgctgcgtcccggcgaatacatagaggcgctgcgcttttccccgccggaggcgagctggcgcatggcctatgaaaaagtgggacggcgcaatgcgctggccatctcccggctcagcgcctgctgcgcggccagatgggagggacagcgcctgaccggactgcgccttgcgctgggcgccgtattccccacgccgcggcggctgtacgcagcagaagcactgcttttgaaggaacagccctcccctgccgcggaaatgcaggcggcagagctggtaacacaggccatcgtggcggccgccgggcggcgggcctcggccagctacaagctggcggtggccccggagctgctgctgcggacactgcgccgcacccgagaggaggcggaccaatgaagataggttttacgctcaacggcgcgcccgtctgcgtggaggcgccggggacggtgtcgctgctgacattgctgcgggactactgccgcctgaccggcaccaaacggggctgcgacatcggcgaatgcggcgcctgcacggtgctgctggacgacagggcggtgacttcctgcatggtcatggccgggcaggtacagggccgccgggtggtgaccattgagggcctgaccggacacgacggcgcactgagtcccctacagcaggcgtttgtggaccactttgccgtacagtgcggcttctgcacgcccggcatgatcatgagtgccacagcgctgctgcacgaggacccgcatccctcccgggagaagatacggcgggcgatctctggcaatctgtgccggtgcacaggctacgacgctattgtggacgccattgacgccgcagcggcggagatggccaggctggtataaaacaagcgtggtaattaccccttatggggcgattataaattcaaaattatgaaggagaaagacatgaaaaagctatttgcattgctgctggcacttgtcatggccctgtctctcgtcgcctgcggcgagaagaaggatgataccggggacaagaccgatgacagcaacccctccaccggcatggagctgacacaggccaccgatctggtgatcgctaccggcggcacctccggtgcatggtaccccatcggcgtcagcatcgctgacaccctgaccaacgtggacaacaacctgttcgtcacctccgaggtcaccaacggcggcgtggagaacgcccgtctgctgggcacccacgcggccaatgtcggcttcgtgaactccgacaccgcgtacttcgccacccagtctgaggatgcttttgcgtccgagcccgcgtatgagctgtacggcctggccaacctgtatgacagcgtgctggagatcgccgtgctggctgacagcggcatcaacagcatcgcggatctggccggtaagcgcgtggtggtgggcacccccgcctcctccgcctccaccatgggctggacggtgctgggcacctatggtctgaccgacaaggacgtgaagggctctgagctgagcatcgccgagggcgttgaggccctgaagaacggcgatgtggactgcgtgttcatcttcagtgccgcccccaacagcgccctgaccgagctgtccgtgaccaagaacttcaagctgctgagcatcgacgaggagcatcagaaggccgcgatcgagcagcacagctacttcagcaccgctaccctgtccgctgacctgtacacctgcaccagcgaggacaccaccaccctggccatgcccactctgctggcctgtgacagcagcctcagcaacgaggccgcctatcagttcgtgaagggcatctatgaaaacctggacgtgatctccacctcccacgcgatggccgccaagatcaacctggaccacgctgccaacatcaacctggagatccaccccggtgccctgcagtactaccgcgagatgggcattgttgactgatcttccccctcttttccccccctgtcccgtcggacggcgggcttcggcccgccgcccggtgcggccccacattccggaaataacgaaaggatcggaacatggcaactaagtcaaaattcagcgatgtactgagtaagatcgcgtttgtgattgccgttctgctgaccctgtttcaatcgtacactgcactgttcggcgttttgaccgccgtataccagcgggcgatacaccttggtctggcgagcagctacatcttcctgttcaacatggcaaaccccaaggagaaggggaaagtttttcacatcatcatcaattttatcgggctggtggcttccgccggttccaacttctacatctgcctgcactatgcggagatccaagggcgcttgggtatcaccactgagctggatatgatcttcggcgcgctgctgctggtggcgatcctgatcatgggatatgagtccctgggctgggcgctgcccaccatctccgtgatcttcctgctctatggcctgtttggccatctcatccccggtgcgctgagccaccaggcctttacattcaagcgcctgatctcgttcctgtatctgggtaccgagggtgttttcggttcggcaatgagtgtcagtgcgacatttatctttatattcattctcttcggcgcatttctggagaaaagcggcgccggccagttcttcgtgaacctggcactgaccgccaccgggcgcgttaccggcggtcccgcgctggccgccgtggcctccagcgccctgatgggcaccatctccggcagcggcgtatccaacgtcgtgaccaccggcaccttcaccattccgctgatgaaggccaacggctatgacaagaacttcgccggtgcggtggaggcagtggcctccaacggcgggcagatcctgccgccggtcatgggttccgtggcgttcctgatggccgagatgatcggcgtaagctacttcaccgtggctaaagccgcagctgtgcccgcgctgctgtacttctttgccgtgggtatcgccgtgtactttgaggccaagcggctgaacctgcgccccgatcccaatgcccagtatgagcgcgtaggggtggtgttcaagtccggtttctactatctgctgcctatcgcgctgctgatcgtgttcatcatttgcggttacagcgtactgcgtgccggcgcctatgccgccatcctgaccatcgctctgagctatgtgaagaaggacaccgccttccgcctgaaggactttggtgcggtggtgaccgacgtggccaagcaggtgcgccccattgtggcagcctgcgcctgcgccggtatcatcatgggcatcacctccctgaccaacctgggcatcaagctctccggtctgatcgtcaccgtgtcgcagggcaacctgatgatcgcgctggtgatgaccatgctggtatccctggtcatgggcatgggcctgcccaccacggcggcctatctgctgctggcggtgctgggcgcccccgccctgatcaagctgggcgcggatcccctgcccgcacacctgtttatcctgtacttcggctgtatgtccaccatcaccccgccggtggctctgtctacctacgcggcggccggtatctccggcggctcgcccatgaaaacgggcatttacgccatgaagctggcttcggtggccttcctgatcccttacatctttgtgtacgggcaggaactgctgctgtatggttctctgggctctatcctgctggccatcctcagcgcctcgctgggctgcgtggccctggccggcggcatgatcggctggctgggtgcaaagatgcccatgcccctgcgctttgtgctggtgggcgcggccattacgctgatgatccccggcgcgctcacggacgtgatcggcgttgtgctgatggccgcctgtgtcatcacagctgtgacgctgagcaagcggcagacaccgaagatccagtgatcttacgcagctgaagggcgggccctccgctgacagaggcccgcggaacggaaatcttacatatggaggaacataaacatggacttcaatttcaagggccgcgacattatcaacggctatgactttaccacgcaggagctgtgccacatcatggacacagccatgatctatgaaaagcgcgtaaaaagcggtgaggccatcaaagacatggaaggtatgctggtggccacgctgttctttgagcccagcacccggacccggctgtccttcaactccgccattcagcgcatgggcgccagcaccatcgacctgggcagcgcctccgcctcctcccagtccaagggtgagacatggcaggacaccatccgcaccgtggacggctatgtggacgccatcgttatgcggcaccccgtggccggttcggccatcgaggccgccgagatcgcgcagcatcccctgatcaacggcggcgacggcgcccgccagcaccccacacaggcgctgctggatatctataccatgcggaaggaaaagggccacatcggcggccagaccatcaccttcctgggcgacctgaagtatggccgcaccgtacacagcctgggctacttcatgcagcagttcggcaaccggatgatcttcgcctcacccgaggagctgagaatgcccaaggagatcactgacgacctgcgcgccaagggcgccgacatcgtggaaacctccgatgtgaaagaggcgctttcccagtccgacttcgtgtatgtcacccgcgtacagcgggagcgcttcccggatgaggagtcctatctgcggtgcaagggcagctatatcgtcaacaacgagctgctgaagtgcgccaagaaggatatcaccatcatgcacccgctgccccgtgtggatgaaatcgccacagaggtggacagctaccccggtgcggcctatttccgccaggcacacaacggtatgtacctgcgtatggcgctgttgggcctgatcaccggtcggatctgacagaacacaacggcaaaagctgtgcaggcgcggctatcccgcctgcacagcttctgcaaggaggacaccatgtacaacactgtatccgtccgttcccaggacattgtcgttcccggcgtgatgacactgacggtcctggctcccgagatggcggccgccagcgcgccgggccaattctatatgctgaagagctggcgggagcaggacccgttccttatgcggcccatcagcatcgaccatatcgatgtgcaggcggggacactgaccttcctgtacaaggtggtggggcggggaacggagctgctgtcgcacctgcgcggcggcgacacactggagctgctgggaccgctgggcaagggcttccccatcgacggcagctgccgccgggcggcggtcatcggccggggtatcggcattgcgccgctgcgcccgctggtggagcagctccgcgcccagggcacggaggtctatgcctatctcagcgccaagagtgaggacgacctgttccaccaggagctgttccgcacgctgggcgccgtggtgaggaccaccaccgcgccgaatgagcgcattaccgacgcctttgccgcagacgcggcgcagctgccctttgacgccgcttattcctgcggctccaatcgtctggctgctcacatgaagcagctgcacgcacaacacggattccctgcctatgtgtctctggaggagcacatggcctgcggtgtgggcgcatgcaagggctgcatctgcaccgcccacgacaaggacagcggtgaagcatcctacgtccgtgtatgcaaaagcggccctgtttttgacgtggaccgtgtgctataatggaacgcacatcgcatagcagcacaccggtaaagggggaagccgccttgtcttccacggaaaaacgcatctatatcttcgagaaagcccccgtccggcgggcggtattacagcaaatgctgcccaccgtcgccggacagatggtggcgctgctgtacaacctggcggacacgttttttgtgggcctgctgaatgcacccatacagacagccgccgttacggtagcctatcccccctttctgatgatgactgccgtgagtaacctcttcggcatcggcggcgccagcgctgtgtctcacgcgctgggacgcagggatatggacggcgcacggcgcatctccgccatcgccttctggctgagcctggccagcgcggcggtattcagcctgctgtgcgggtcgtttctgcacccgctgctctctctttgcggcgcggacgcggaggtatatcccgtggccgcggcctacgcccgctggacgctgctgtggggcggcgcgggcacgatactgaacctgctgctgtccaatctgctgcgtgccgagggccgggccgcgctggccttcgccggcgtgacgctgggcggcgtgctgaacatcgtgttggacccgtttttcattctgccgcagtatatgaatatgggcgcggccggcgctggactggccaccgccatatccaacacggcaggcacgctgttctttctgctgtgtctgctgcggcggagcagcacggtgctgtccctgcggccatgccatctgaagcgtaccggcgtttatatccgggagatactgtccattggttttccctccgcgctgcaatacgcgctgacggtggtgtcgttagcggtgctgtccctattcgtatccaaatacgcggtagaggccgtagcggcctacggtatcgtgaaaaagctggacaatctcccgctgtacttttcgctgggcacctcggcggggctgctgcccttcctgtcctacaactatgcctccggcgaccgggaacggcagcggcagggctttgtcttcggcgtcagcatcaccgtgggcttctcgctggcgtgcgttatcgtgtttgagttgttcgcgccgcagctggcgcggctgttcatccaggatgacgtgaccgtggcttacgccgccgcctttttacgcagaatggtgctgtgtatgcccttcgtggccatatgccaccccatgattacacagttccaggcgatgggacgcaccagggaatccctgatctgctccatcctgcggaagggctcgctggatatcccgctgctgcttctgctggaccgcctataccccctgtatggctgcgcgctggtgcagcctgtcgtagacctgatctccctgatcgtagcactggtcctgtaccgacgcctacggcggacatcagttgtctgacgcgcaaaatacgctggaaaggagaaggcgcgtacacctctcgccgcgcctttgcaccgttgtgaattacctgactgatctatccgtggagctgggcggcgcggtgttcaaaaaccccgtcatgcccgcctccggcacctatgattattttgaaaacaatgccgactgcttccccgtcagtgagctgggcgcggttatgatcaagagcgttcaccgcctgcggcggcccggcaatcccggcccccgcatcgccgaggtctgcggtggaatgctcaactgtgtgggcatcccctccgtgggtatcgaggcctttctgcgggacgaattgccccggtatgagaacatcggcacccaggtcatcctgagcatctccggctccgagccggtgcactacgccgagatcgcggaactggtaggcgacgatccccggatcgccgccctggaaatgaacctgtcctgtcccaacgtgggcagcggactccctttctcctccgacccgcagctgctgtacgacacggtacgtcagacgcggcagcgcacccccctgcctctgtacgcaaagctgtcccccaatgtgacggatatccgggtaagctgccgggcggcggaggacgccggcgcggacgcgctgacgctgtccaataccttccgggctatgactatcgacatacaaaaacggcgaccctacctgggaaatctgtccggcggtatgtccggcccggcggtaaaacccatgaatatgtttctggtgtggcaggcctatgagaccgtgcacattccgatcatcgcctgcggcggcattgcctcatggcgggacgcggtggaatacctgatggccggagcttccgccgtacaggttggctcctgtaatttcaacgatcccatgaccatgcacaacatcatccatgaccttgattcctatctgcaccgcaatggcatcgcctctgtccgcgaactgtgcggtgccgcacacaaacaatgagttgagtaatgagtaaaatgagtaaggagtgacgatcatgacgaccgcttatcgttccctctccccggaggcactgcgccgggaatacgcagaggtctccgcccggttcgacgccctgcgtgaactggggctggcgctgaatatggcgcggggcaaacccggcaaggcgcagctggacgccgtatccgacatattgaccatactgcacgaccctgtgcagtgccaggcggacggcatggatgtccgcaactatgggcagctgtccggtctgcccagtgctaaaaaactgttcgcggagctgctgggctgccgggcagaggaatgtttcatcggcggcagcgcctcgctgacgctgatgtatgacaccatcgccaaggcatatacccacggactgctccacagcgaagcaccctggagccggctggacaaggtaaaatggctgtgcccggctcccggctatgaccggcatttcaagatcacagaatccttcggcgcggagatgatcaccgtgcccatgacgcccaccggcccggacatggacctggtggagacgctggtgcgggatcccgccgtgaagggtatgtggtgcgtacccaaatactccaatccggacggcatcgtgtattccgccgaaacggtgcggcgcattgccgcactgaagcccgcggcgccggactttctgctgatgtgggacaacgcctactgcgtgcatgagtttgagggcccgttcgtgccctttgacgacatactgaccctctgccgcgaggcggggaacccggacatggtgttcgagtacgcctccacctccaagatcaccctgcccggcgcgggcatatccgtcatggccgcgtcgacggctaatctggcgtatatggaaaagctgatggatatccaaatgatctcctacgacaaggtcaaccaactgcgccacgtactgtttttgcaggataaggcacacacgctggcgctgatgcagaagcacgccgccatactgcggcctaagttccggtgcgtgctgcgctgcctggagcgggagatcgcaccgctgggcatcgccgcgtggcaaaagcccaccggaggctatttcgtatccgtgaacaccctgccggggctggccaaacgaacgctggcgctatgcaaggaggccggcgtgaccatgactggcgcgggcgccaccttcccctatggcgtcgacccgcaggacagcaacatccgcatcgcgccttccctgccgccggtggaggagctggagaaagccatggaggtattctgcgtatgcctgcggatggccgcgctggaacagctcctgcaagagtaaatgcgaaaggcacaccccaatggggtgtgcctttcagcttttgatccggcgcagtacagttgtgctgggtgcgctttgctattaaattcgcttatacgccatatattaaatcgatgttttacttattatcttgctgcgcgtataatgaaccgtcgtttgaaaataacacggaacggaggcagcgaacatggcaaattgcgcgatcgtaggtatcaactggggcgacgagggaaaaggccgcatggtggactatctgacagggcagtatgatgtggtggtgcggtatcagggcggcggcaacgccgggcacaccgttatcaacgatatgggcaaattcgccctgcacctgctgccctccggcgtgttccgccccggcgtgatgaatattctgggcaacggtgtggcgctggactgcgaaaacctggtgacggagatggagacgctccgcgcggcgggcgtcagcatctccccggaaaacctgatggtcagccaccgggtctccctgctgctgccgtggcaccgggagctggacgcgctggaggaggcgcggctgaaggacaagatgtacggctccaccaagcagggcatcgcgccgttctactccgataagtaccagaaaaagaccattcaggccggtgagctgctgtatcctgatcgcctgatggcgcatttacaggacctgctggaatggaaaaatctcatattgcagagggtctatggtgccaagggctataccatggcggagatgaccgcgtggctggagacgtatgccgcgcaggtccggccctatgtagcggacaccgggcggtatctgcggcaggcgcaggcagagggcaaggccattctgtttgagggacagctgggcgcgctgcgcgacctggactacggtatctatccctataccacctcctccaacactatcgccgcttacgcgcctatcggcgcggggctgcccacagcaaagatcgacgaagtggtgggcgtggtgaaggcgtattcctcctgcgtgggcgaggggccgttcacctgcgagtggttcggcgccgacgcggaaaagctgcgggaggccggcgcggagtatggcgccaagacgggccgcccccgccgggtaggccccattgacctggtggccacacgctatggcgtggaggtacagggcgcgacgaatatcgcgctgaccaagctggatatcctcagctacatgaacgaggtcccggtctgcgccgcctatgagatcgacggcgagctcacccacgaattccccttccctgccgtgctggagagggccaagcctgtcatggaatacctgccgggctggggctgcgatatctccggcgtgcgtacatgggcggatatgccccaggcggcgcgggactatgtggagtatgtggagcaggccatcggctgccatatcgggtatgtctccgtgggcgccgagcgagagagcctgatcatccgataaacaaggaggaccgttatgtctcacgatatgtacagctccccgctggcatcccgctatgcctcggactatatgctgcacctgttttccgacgacagccgctatcagacctggcggcggctgtggacggcgctggcccgcgcccagtgccagttaggtctgcccatcaccgaagcgcaggtcgccgagctggaggcgcatatcaccgacatcgactatgatgtagccgcccaacgggagcgagaggtacgccacgatgtgatggcacacatatacgcctacggcaaggcggcgccgtcggcggcggggatcctccatctgggggccaccagctgctatgtgaccgacaacgccgacctgatcctgtaccgggatggccttgtctatctgcgcgcacagctgctgaccgtattgaacaacctggcggccttcgcgaaaaaatatgccgacacgcctgccctgggctatacacactaccagccggcacagcccgtgaccgtgggcaaacgcgctgtcctgtggatgcaggactttctcgctgacgtggaggagctggaccatgtactgtccgcactgcggttcttgggctgccggggcaccacgggcacagaggccagcttcatggacctgtttgacggcaatgaggcaaagatcgacgagatgaaccgccgcatcgcggcggagttcggcttttccgcctgcttcccggtatgcggacagacctatccccggaagacggacagccgcatcctcggctgtctcagcggcatcgcccagagcgcctatcgtatggccaacgatatccgccttctgcagcatgaccggcagctggaggaacccttcgaggcggatcagatcggctcgtccgccatggcctataagcgcaatcccatgcggtgtgaacgcatctgctctctcagccgctatatgatagccgacgctatgaacgcgcctatgaccgcttccgtccagtggctggagcgaacgctggacgactctgccaaccggcgcatcgccatgccggagggttttttgtgcatcgacgcagtactgcggctgtgccaaaacgtgacggcgggtctgcacgtcaacgaggcgatcgtaaatcgcaccctgcgggaatatctgccgttcctggccacggaggacctgatgatggaggcggtgaagcggggcggcgaccggcagcagctgcacgaggtcattcggagacactctatggcagcaacaaagcgcatgaaggaaggtctgccctgcgacctgctggaccggctggcaggcgatccggtcttcggactgagccggtcggagctggagcagctgatggagccgcggctgtatatcgggcggtgcccgcagcaggtacggaaatttctggatgcctgcacgccgctgcttcggcaggcgcaggccgctgacggggacatccggatatgagcacagagaacaccggggcacgctgaaaattcatcgcgcgtgaaaaggtcgagagccgcttattcccagaccggaataagcggctcttttgcagttatccatttggacatttggaaggcggaaatacggtacggctcatcccttgacgcttcccagcgacacgccctccacgatatagcgggaaaggaggaaatacatgatgaacaccaccaccggcgtggtgatggccgggatgatcagcggccagtaggtgtcgatcagcttcagctgtatcataaacttataatagccgatggcgaacacctgcgtgggcaccatcatcaccgccaggataaagccccaggcggtaaaaaacggtgcctgcaccggcagcgtggctcacggctgggcaccggtaggcgccatgcagttcacgctgtcgctggcccccggcgcatcccggtccctgctgctgggcctgggcatgggcttccgtgactcctgtcaggacctgctgggcgtcgtccacatgatcccccagcgggcgagggaacgcatcctggacattgccgccacccagttccccgacggcagcgcctatcaccagtaccagcccctgaccaagaagggcaacctggctgtgggcagcggctttaacgatgacccgctgtggctcattgccggaacggacgcctacctccgcgagacgggcgactggaccattctggacgcgcccaccttcggcgaggacaagaacagctggctcaccggcacggcagcctggacgttcgtcagcatctcgcaggccattctcggcgtgcagcccacgctggagggccttgccatcgatccctgtatccccgcggaatgggcaggctataccgtcaagcgccgctaccgcggtgcagtctaccgcatcactgtagagaatcctcaccacgtagaaaagggaatcgcttccatcgccgtggatggaacacccatcaccgggaatgtgcttcccccggccgcacccggcacagaggtgcaggtacgcgtggtcatgggctgagcgcaataataacaacacatcccccgcgcagatacgctgcacgggggatgtgttgttattttgaaaaggagtataccgtgcagtgccggtatacttcgccccgccgcagcagcggctggggaaagtccgggtgatgtaccgcgtccggcgggaactgcggctcaagacacacggcgcagcggggctcatataccgccccattctttccgtcgcgccgggacagccagttggccgtatacagctgcacaccgggagaggtggtgtccatcgtcatggcgatgccgctgctgtcgccccgcagcaccgccgcacggcgcagaccggccccgtccacgcagaaatggtggtcatagccgttcaccagccgcagctgctccgccgccgtatcgatgtcccggccgacagctttagctgcgcggaagtcaaagggcgtccccgccaccggcagcgcccgccccgtgggcaggcagccgggagacgtctccagatacgtccccgccgccaacgtcagcgtatgcgccatagccgtaccgccgccgttcaggttgaaatagctgtggttggtcaggctgcacagggtgtcggcatcgctttccgcctcgtattcgatccgaagcgactcgccggccagccgatacgtcaccgacaccgccaacgttccgggatacccctcctccccgtcaggcgacaaacggcgcagccgcaggccgtcctccagcaactccgccgcccagatgtatttgtcaaatccccgcgcgcccccgtggaggtggttccctccgtcgtttttcgccagtgggtacgtcttgccgttcagtccgaaggacgccccgccgattcggttgcacacccggcccactgtcgcgccgacatagccgtcgtttcgctcatactccgacagggtgtcatagcccagcaccacatccacaccgccgaataccagccgccgcagcgttgcgccgtaggtaagcacctccgctgtcagaaactcattttccagtgtccagctttccacggtctcgccaagcgctgttatgccgaaagtctgacacatctccctcatctatgctgcctcctctccacaggtgcgtttcagcttttcgcccttagtatagtctgcattttgccaaaaagcaagggctccgatgtacataaagccagccggacgttggacggtccttttgcggccggagagcaaaaaggaaaccgccctggtggacggtttcctttttgaggggaggtaagggagatcactcaggcagccacagcggcctgtttgcgggagatgttcttcatgaccaacagggcggcaatgatgcacaccagggtcacgggcagagccagcacgggagccaccagtccggcgaacaggaagccgatcagggaggagataccaaccgtcaaggcatagggcagctgggtctttacgtgctgcagatggtcgcagcaggcgctggtggaggactggatggtggtgtcggagatgggggagcagtggtcaccgaacagaccgccggaaacgaccgcgccgatagccagagtcagggggatacccattgcgttggccatgggcagggcgatgggcatacccagggcccagacgccccaggagctgccggtggcgaaggacaccaccacgccgatcaggaacaggatggcggggatcagcgccgcggggatagaatcctgcaccacgccggtgaggaactggccgatgttcatggacttggtcagaccgctgatgctccacgcacacacgaggatcataatgacctgcatcatgctggccgcacccttcgtccacttgtcaatggcaccgcccagggtaatgagcttggacttaatgcccacgattccggcggcgatggagccggtgaggaagcacatggcgatggccatctggatattggcgtggccgaagcagccaatgaagccgttgacccagatctggccagtgtagaacaccacggcaaagatggtgaggatcagagtgatcatgggggccaggaagttggccatgctcagcttgcagtcctcggcgaagtcggtctcggggggagtggcgatcaggttgtcggtgtcgctgtaggtcttgccggtctcgatagccagcttctcggccttgtacatggggccgacatccagaccgaacaggatgaccagcaggacggtgatgacggagaacacaccgtacaggttgaactggaacataccgaaatacaggtcataggcacccacgccggtgaggttcagggcggcgatctcggcggccagcagacccaccaggtacacgccgttatcactgatgggggacatagagaccagcggtgcgcccatggcatcggtgatgtaggccagctttacgcgggagatatgggtcttgtcggtgacgggacgcatgatgacgcccaccagcaggcagccctgattgaagatgaatacgaagggggcgatccatgccagcagctggctctttttgcggttgttagccaccttctcggcccagcggccgaaggcctccgcgccaccgcaggcgctgagcatatacatgaagccgccaatgagcgccatgatgatcagcatgcccgcgttccagctgtcggcaatagagggcaccaggtacccagtgaagctgccgatcaggccgtcgatggggttaaagtgatggatgatggtagcacctacccagatgccgatgaacatggagatgatggtctgcttggtaacgaaggccaggacgatggtgaccagcggggggaccaggcaccatgcgccgtactccggtgccgcttcgccgtcaccggcagcatagccgataacggtcagagcgagcatgagaacggccaccagacatacaccgataagatttcttttctttttcatgattctctcctctcttgtatcgtcttattctgatgcgtgggaaaggggatgtcaacgggaatataccaacttacctcccaagtaggtttgctcaactttggtgttgacgatctcattctccgggatggagaagatgtcctgggacaggacgatgaagtccgccagatagccggggcatagcttgcccttgacgttttcctcgtagctggtgtaggcggagccggtggtgtacagcgccacggcctcctgcacggtcagcttctgctgcggcagccagccacccgcaggctgtccatccaaattctgagaggtgacggcgcagtggatagccaggatggggtcgaaggattccacaggggcgtcggagctgccggaaacgtggatgcccttgtccagcatggtcttccaggcgtaggaggtggagacacgctccttgcccagcagttcctcggcgatctccatatccgcacggatgaacaggggctggatgtccgccaaaacgccgttgcgggcgaagcggtccaaaatatcttcgctggtgatctgacagtggatgatgcggaaccgaggatcgggcttggggtacttggcggcgatcttttcatagcagtccaaaatcacgtccatggtatagtcaccgatggcatggatggccagctgcaggccgttgcggtaggctttttccagcaggtcatagaacaccttctcgtcatagacgaagatgcccttattttccgggtcgccctcatagggctcacgcagcgcggcggtctttccgcccagggaaccgtcgggcagcagcttgaaggcaccgatcttgaagaactcgctgccgtcgccggtgcggccgctgtggcggtggaggtagtcctccagctgcgcgtcggtgatgaggcggagctgctggatgaagcgcacgttcagcttgccctctttgtccagttcctcataggcggccagaatgtcatcgatagtggcgtcccacagcttgaagtcgtcggtctgtacggtggtcaggccggtggacagcagatccttctgatagtccaggatgaactgcttcagctgttccttggtgtacttggtcaggatgtcatagaccaggtgccgggcgcgctcgtggagcatgccggtggggacgccgttttcatccaccacgatgtgaccgtcctgcagcgtgggaatatcatcaaaaatgccggcggccttcagcgcggcggtgttggccacggccacgctgcagcaggtacgggtaaagatggcggggttgtccgggcagaacttgtccagatcctgccgggagggcagcacaggcacgtcgaactcattttcgttccaaccgccgccctggatccattcgccctttttgatgccgcggtcggcgatgtaccggcgggtgcgctcggccatttcctccagagagcggataccgaagaagttgatcttctccttatccgtggcatagcagaggaagtgctcgtggctgtcgtggaagccgggcagcacggttttaccgtgcaggtccaccacctgacactcgccagcggggacatcgcagttcacatccagaatgcggccgtcctccaccagcagggaatgaacgacctctgtgccgttcatggtgtggatgctgccattgcggaacaaagttttcacgatttgctctcctttcttattacaggatgatccagcagatcaccccagtgaccaaagtgaggatcgctgccgtcagcagcgtgaagcgcagtaccgtgccctcttcgccgggtacgccgccggctgtggtgcccaggatgatcttgctgggggagatcatactgccggcggaggcgccggcggtctgcgccgccagcagggggctgctgctgacgccgaggtcggcggctgcattcacctgtacatcggtgaacaggatgttggaggacatgttgctgccggtgacaaaggagcctatcacgcccagcacgccggccagcagcgcgtaccaccgacccatgacgtgggtgatgccctgcgccagcaccagcgtctggccgctgccgctcatgagcttggagatgatcagcagcaggatcagggacacggctacgggtcttgttttctgcagcgtccgtgacagcatgacgcggagctgtgaacgcttcagcagaccgcggccatggagcagggcgtagctgatgatacaggtcagcagcagtacggtaccggaatccaccagcgggtggaagggagagtacttggccgtggcagcattgacgatgccgtaggcggtgcgggtctcggggaaagcgaaccccacgctccagcggctcagcgcctcgtggacgggtgggatcaccagaagtactacggtaacaaggatcagcaccatatagggggcaaagtacagccagacggcgccgcgaggcttttccgcgcctgtcgcggaggtccggcgtaccatcatggggctgccttcacaggcgtatgctctgcggtacatgggcagacgggacagggggagtatggcggccatagccacggtggcggggataaaggccgcgatggaggcgttgtactgtgcgaccaacagctcgccgccgccgtgtatcagggagatcacaaggacaaacacagcgccctgccgcagcccgcggccccggtcatacagccagcagatcaatgcgccggcggccaggttcagtatccacagaagcaaggcggtgtagcgggcagtcagatgcagctccgtgccggtgatgccggagatctgcaccagcacgtcccaggccacagccagcgtgccgaaggtgttgccccaggcttggcccagcagggcgatgatgaccgccatggtaggacggacgcccagcgccaccagcatggggacgcatatggcgaccggaacgccgaagccggtgataccctgcagaaatcccacgaatacccagcctactgtcaggatgcggaacagctcgtgggggctcagctgccgcatggtgtcgttcatcacatctatggcgccggaggcggcgatgagctcgtacagcagcagcgcggggaagatgatatataggatggtggctgtgctccacacgcctttcagactctcgaacagtaccagctgtatgtccgctttgtacactactaaggcggatagtacggtcagcagcagtgtcacacctgcggcgcgggcggtagatacgcggaaaaccgccagcagcataatcagcagcagtataggtaaaaagctgacgcaccaggtcagaacagtaattttcatgtgctccctcttttgcggcctgaagtattttcacctatagggtagcacgatttcctcggccatgcccgccgcacggcacaaattcgcgcccggttttttgtgcgtctgcacaaaaggcggtttacacttatggggtataatggtatcatcaaaatagggggtgttttggtgttttgccgaagggaggcgtacttatgacgctgcgggagcttttgaaacagaatgagctgcgggtggtggaggtggccgccggtgcggacggcctggcgcgcaccatatccggcgcagtgatgttcgataacccggagatggtcaattggatgcgtgccggagagatcatgctgactacgggctactttttgctggacgacccggtaaagcaggagaaggtgctgcgggatctggccggcagcggctccggcggccttattattaaaatgaaacggtattttcatgagataccgcccgctatgctgcagctggccgatgagctgcacttcccgctgatgcgtattccctaccacacctccctatctgagatcagtgaagccgtcagcaaatatgtttacggcatcaacgaggaacaggcgctgcagatggtgtatcaggccatgtttgatgtgctgcagggacacgcggaggtggaatatctgctgaaaaagtgcggcccgctgcttcacgtgccgctgctgtatatgacaccgagccggaagatacagtgcgtttcccagatgctgcagccggggctgcgggaagaactggctgtggggcaggtgctgttctccgtgccggagcgcgtcaaggaggtagaaaaactgcggacagcaggtctgtccgccgggatctatcccttacagcaggaggacaagtgcgtgcacatctatcccatccactccgagcaggagatcatggggtatctgggcgcgatccgccccgccaatgcgccgctgaccgagaatgagaacacattgtaccgacgtattgccgccgcctgtacgctggtgctgatcaaaaagcgcgggggttcatcctccaggagggagatcagccacttcctggacggcctggtgacggagggagctttgtcctacggcgagatcgtcaaatccgccaactactgcaatatcccgctgtattcgccctatatctgtgcgctgatctccttcaccgagcagaaccggctgctgcagacgtcagaatggctgggcaccagcgccctgctgcgcagccagttggcggacaagtgggagatgctgtccgggaatatcagctatgctttcgccaagtacaacaacgtgatccttgtgctgcagcagagcgagagcctgcccgtgtatgagcaggtggcgctggtgcgggagtactgcggggacctgatgaagatgctcagcgctaaggggcaggatcggggtgtgatcttcggcatcggtgaccctgtgccctcgcttgcggaattctgccgcagctattcccaggcgctccgcacggtggatctggccagcaggatatgcgacgagcgtattgccacttaccgccggtatattctctgcgaactcatctatgactcacccaatgcgaaactggcgctgatccagcggatcaagccgctgctggcgtacgacgaggagcacaacacccagctgctgtacacgctggaaacctatttcaacaactgtcagaactccgtaaagacctccaaggcgctgtttatccaccggaacacgctgctgtaccggctggaccgtattgccgagatattggatctgaactataacgacagcgagcagatgctgaccttccagctggcgctgaaagcgtttctgatgtgccagtaaagtaaaaccggccccacggcatagccgtggggccggtcggtcagttcagttattccgcagctcaagctgcaggcggtcggtgatcatggcggcgaactcctctggctgcgtgccgatggcgctgaccttctccccgccgtggggcagaacacgatactccatattgtcctcttttcgcgggatacggtcccgccgatattctttacgggcattgtaccatattgcgcggcctgaacaagcccggccgggtattggacgcccggacaacggactgtacccgcacatttatatgctgtatatcacggtgctccgccacgccggggttgcgaaaagcgcgcgtccgtggtaccatcgattgacaaggacttgtttgtccttgtcaatcgatggtacagtgaaaaaacaagctctatggagggacacccttgaaaacggatcatctggctttgctgcgcagcggcgcgccgctgtccacccggcagcagatcagcctgacgctgcagctcagctggccggccatcatggcacagctggccactattatcatgcaatatatcgacgcggccatggtgggccgcctgggcgcgtcccagtcggcggcagtagggctggtggcctccaccacctggctgttcggagggctgtcctacgcggcagctatgggcttcaacgtgctgacggcgcagcgggtgggcggcggccgcctggccgaggcgcgcaacatcctcaagcaggcgctggtgctgtgcctggccttcagcgtggtcatggcggcactggcggcggcactgtctgcgccgctgccccggctgctgcgggcggagcaggagatctggcgggatgcctctgcctatttcctggtgtacagtctgttcctgcccgccctccagctggacaacgtggcggcgggacagctgcaggccaccggcaatatgcgcacgcccggtgtctgcatggtgctcatgtgtgcgctggatgtggtgttcaacaccctgcttattttccccaccggtaccatccggctgggcgcactatccctgcccggcgcgggactgggcacagcgggcgccgccctgggcactggccttgcggagctggcggtggggttgtacctgctgtatttcgtcctgcgccgcagcccggcgctgcggttggagaagggtgagcgtctgcaccttgaccgcacacagctgcgcatggtgctccgcatcgcggcgccagtggcatcggagaaggtgatactgtccaccgcgcagatcgtgtccaccgccatcgtggcgcccctgggcaccgtggctatcgctgcaaactcctttgctgtcacggcggaaagcctgtgctatatgcccgcctacggcatccagagtgccgcggccatgctggtggggcagagcgtgggagcgggacgccgccgcatggccagacgcctgggctgggtcacggtactgctgggtatcgttgtcatggtcgtcaccggcgggctgctgtacgccttcgccccgcagatgatggcgatactgacgccggacagcgacatcatcgccctgggcacccgcgtcctgcgtatcgaggcctttgccgaggctatgtacggcgcgtccatcgtggccggcggcgtatttcagggtgcaggcagcacactggtgcccacactgttcaatctgggcaccatgtggggcatccgcctgccactggcgtggctggccgcgccccggtggggactgcccggcgtgtgggcggccatgtgcacggagctgtgcgtccggggtctgctgtatctgatacggctgggaggcaaacgctggctgccgccggaggggccggccgggcaggcatagacacagcggtacgaatgaaagcagaaaactctgcatagcaacacctataccttatccagaccgccatcgagcagggcaaaacagagctggcagagcacctgtacgccctgctgcgatcaaatccgctgccgcgagaggaatggcgtgaaggccccgatgcgttcaaatctctgatggaggaacgtgccgatacggaggataacgtgccgatgtaccgctactgaagcagtgaagaaaaacagcgtaaacggcatgggtagaagcgttcacaaatatctgctgtaatttttttgaagaaattttgaaaatcgtgaaaccaaatccgatttttgtcgggatatatagtgaaggaacctgacagcagatgagaaaggaggttcgcccatgcaggatgaaatgatcgttgacttatactgggaaagagatgagagtgccatcagcgaaacggatcggaaatatgggcggtatctttcaaagatcgcctacaatatcctctccgactgggaggacagcaaggaaaccgtcaacgatacctacttaaaggcgtggaactccatgccaacgcataagccaagcgtcctctccacttatttaggaaaaatcacacgtcaactatccattgatgcgttccgcacacgcaacagggataaacggaagcactcggaatatgcaggctctctttccgagctggaggattgtatttccggcagcgaaaccacggagcagagcatagaattgaaactgcttgcggaagcgatcaatacctatctctacacgctcccggcagaagcacgaaacacttttgtcggcagatactactttgcggatcctatccgagaagtcgcagactactacggcatgagtgaaccgaaggtcaagagtatgctctaccgaacaaggcaaggtttgaaagaatacttggaaaaggagggctatgagctatgaagaaagaacacatcagtgacgctttgaatatgctgaacgatgatattatcgaggaaaccaacaatgtccgcaccaatgcgaagccgaagcgcaagtgggttaaatggggagttgttgcagcctgcctgtgtctggcggtgactatcgccattcctgtgcttcaccataagggaggtcctgacacccaagatcccgtgcagaacattgccgcacttgagtacaacggcaaattttacgaggctgtcaaacttccggaggcgcttgagaagtatggtctgccgcctgaaatcaccgccgatatggctggcgaacacatttcctacctgaaatctgacggaggcattggctataaaagcactgtcagccagactgacatcgagctataccggtatgcacctgctgtttgtgatggcgtatatgttctgcgagacggtgacacatggtatgccgcgctgttctgcaacttctatcagtttgacagcaacacaaactgttcgttcaccgagctttatcgcgtgtatggcattgagagcgcagacgatattgcatccattacagaaatgaagtggaacaacgaacaagaagttggctcaccggtaacaaatcggcaggaaatcactgagttctatcacatgacgattacacttgtgagttatggaaacgatgatttccagacggaagtatttgatggtatccccgaagaaaatcaacaggaagcgcacactgcttttgccgatgatcgaagaaatctccgaatcgaaaccgcctctggcttgcgcttctttatctccttctatccgaactatgactggattgatggcggaggcacaatgtcctatttcaaaattgataaacagatgcacggatggattgagagaaatttgaacagataacagttgaagtatataaatattagaaaagagcagctattttcgcatagaaaacagctgctcttttcgtttgccccaaaaatcaagaaaggagtgactggtaatgtggactttttgacctttggcctcagggatacggacgcgcttcgctttgagaatatggacattgccgaggagttgctgtctctgacagatggatcagcgtgcgaacagatgcggctttcaggtcgaagatcaatgggggcactgtttaggtgcccccatgtcgtgcttatgtagtggaaactgtttccgccgggaattgccggccggtgtggtcgatggtgtagggcggatcgaggatcagctgactgatgggcacaacggtatacccgtcgttgatcaggcagtcgagaatggcaggcagggcctccggcgtgtgcagcgcagcgttgtggaacagcacgatgctccccggctgcaccttggatgttacgcgcctgcatatcgtatccgcgtcgtagtccttccagtccagggagtccacatcccactggataggttccatacccatggagcgtatggcggcgatgacgtggtcgtcatactccccgtagggacaacggatcagcgtgggggtcacgccggtaacagcactaatccgctcgttgctggcggtgacatcgtcaatgatctgctgagtggacagactgttgtaatggtcgtggtgatcggagtggctcatcacctcgtggcccgcgtcgtgcagggctttgacggactccgggtacttctccgcccaatctcccacaacaaagaaggtggtcttgacaccataccgcgccagaatgtcgataagcgtctgggtgtcctcgttgccccacggtgatgcaaaagtgcggcagttcacggagaactgctgctcaccacgtttcggccagcaggaaatcctgaagatgcacgattctaatgccgttttcaatccctacatccatgtcatttagggtgacaacatatttggggtaatggtccttgatctccatgaggttgcccacctcacggtcagagccctccggcagctggacgcaaacctgcacatagatccgctcgtcgcgacgggcggccacgaagtcaatctcttttgtttcattcttgccgatatacacatcgtacccccgtcgcttcaattctagaaacacgatgttctccatggccccgtccagcattttgcggttatagcccaacagggcatatttcagggagacatcggccagataatacttctcctgcgttttcaggatgctttttccttgcaaatcgtagcgctcacagggatagatgatgaacgcctgctccagccagcgcaggtagttgtagatgctctccactgagaccttgcagtgctcgcttttcaggaaggtagaaatcgaattggcggaaaaggtcttgcccacattttcgatgatgaatttcaccacacgatcaaaaatatcctgcttgttgatgcggtgacgcttcaaaatgtctcgggagaccacggtgtggtagatgccgttaacgatctgataggcgttctgcgcgtcatattcactcagcgctattatggggaagccaccaaagcggatatattcctccagcaattccttttgggacagtgcgctgctagctttgaagtccaggtactcgcggaaagacagggtgtagacggggatagacacatagcgtcccgtcagataggtggagatctcgctggacatgagtttggagttggagccggtcacatagatgtcggcgtccgtaccctccagcagactattgaccgccctttcccagccggtgatctcctgtatttcatccagcaggaggtaacagtgccccttgcccgccatagcgtccaacagctcgttatgcatctgcttggcggtaatgctttcgggaatgtccatctccgtgtaccgcttgcggatgatgtgatccacagacacgtcccttcgcagcagctcctccagcatttcgaaaatggtggatttaccgcagcgacggatgcctgccagtatcttgaccagcggttggtcgataaaaggcgcgatggcctcgatataattcggcctgttgaccatggtatcgcctcctcgcaatcgttagtatgcccgaaatactttcgttatgcaacaagtttttagagtttaaccttaaaaacttctatgtgatcttcgcttttttgctttgctctacacggagaaccatacgctcacccctccagcagagcgcggcagccattcctctgcagccgtcagcggacgaagcgcaagcggggtaagtggttacataaaagaagacgaggcgcggcgaaaagtgtataaacaggcgtatttctggtttacataatttatgacgtgggagagtctgtaacctgttccgccggaaactgtcggccggcgtggtcgatggtgcagggcggggggaggatgagctgggagatggggaggacggtgtagccgtcgttgatgaggcaggtgaggatagcgggcagcgcctccggtgtgtggagggcggcgttgtggaacagcacgatgctgccggctacaccttggaggtcacccgccggcagatggtgtccgcgtcataatccttccaatcgagggagccctatcggcaagaacttgaagccgttgcggcgtaaggggtttcacaacatgacctcctccataaagataacgaggagaatgcagggactgaaccgccaagcaattaagaaatctggtgccggaactgacggaatagtctttcagaaattgccgcgaaagctcccacaccgtacgcataacgaaagctccgaatcgacctgcagcgcagctccaaaacgaaaaccaccttgtcgggggggcaaaccgctgatcgcagtgagcggcactttatgacagcagaagctcgatcagttcctcattcttcagcccgctgaaatagcggcccgcatcctcctgcgccagcgcatcgcggaggctctgctcctccagccgcacgcccgccagcttttctgccagcacctctggctccaccacgctgaaaaagtcgccggtgaacgcaatatgccggatgacgccgcggtcggtggacagatgcgcctccacaccgccgcaggcggggaagcgcttctgtctggtcatctcgcattcccgggactggccatagttccattcccatgtggcgtaccgctgctctcgcagccgagcgatctgcgatttgtcctcctcggtaaagacatactcctcgccgggctgctgcgccagaatgttgtccagcagcacgcggcggaattcctccagctccacgggatggggcatatgctgccgcacggtggtgacgcggcttcggacggagaccacgcccttggcggcgatcttttcctggtccacatgaagggcctgcgccacccggtccagatcggagtcgaacatgatggtaccgtggtgcatgacccggccctccttcagatactgggagttgccggagaatttctgcccgttgatggtcatgtcgttccgcccgttgacctcagcctgaacacccagagccgccagcgcagccaccacaggctgacagaacagcttgaagttgatggactccatactgccggcatcggcgataaacgtgaagttcaggtttcccatgtcgtggtacaccgcaccgccgccggacagccgtcgtaccactcgcacaccgttttcgcggacgaattgctggtcgatctcggcggcggcgttttggtgcttgccgataatgatggcgttgtcgttttgccacagcatgaaataggtgcggtcccgagggagtgcgtcaaacacatactgctccgccgccagattccacgcaggatcggtggtgtagaggttcagataagagagcttcggctgtgtcatggcaataggctccttggttctatgatgtgtgtttcaggatcgatgtatcgctcagctgtttttcggcagcgtcgatcggtattcgctgggggtcacgccggttttggccttaaatacccgcatgaagttctggatggtcaggaaaccgacatcctgaccgatgtcgcgtaccagcctgctgtcatccgccagcagctgctttgctttttcgatgcgaaggtcgctgagatactgcgtgaatctctttccatcgatctcactgaaaatacggctgagatacgacggactgatgcccagctgggcggcaacgccgtcaagggacaggctgctgtccatgtagtgctcccctacgtatttcttggcggccagcaggtatctgcgctgacgattgtccagattggtaaagatctcctgtaccgccgcgcgcagataggcacatagctgctcgtagtacgcatctgtgagcggatcgccctccggcgcaaaggcgcccagctttccgcgataggtgcgattcagctcctgcagctcgctggccagcatctgacagcagtccagcgtgtcctgatcgggcagctccgcttgccggatggtagacagcaggtgacgcagcgtggtggacgccgcctcctccgagtgctccgttatggcgccaaccgtactgcggatgcgcttttcaagatccgcgcgggagacctgccgggcagcgctggtctgtgaatcggacaggagcgcctggtacacgctgtggatctgcagcagatcggagaaccgcgggctgcagacgaccacgctgttggggagactgcgcgtaaaaatatggatggcgcgcgtcaaatcctctgcctcaccgtcagcaatcgcctgtttgtcctgtaaacaggcaatggtcaggatgctgtatcgataggaaaaggaatacagcctccagcggggaaagtgaatattttgcaggtttttgatggtatgctcaatggctgccggattcagcacgcctgtgacgcggttggacgtgacgaacagcagaaatgtcccttcgcacggcagcgtgtcgggaaggcttgcgagtgtctggcggacagaatctgcgtccagctccgcaccgtccaccagctcgcacagcagctgacgcagcacatacggggaaatgatctgtatgatcttgcggaactgcaccgtgtcgcggctaagggcgagaacactgcggttgagcaggtcccagtcgctgacagactcgtttttcggcagggcttcatcgctgctgcgcagtgtttgcagcgttttccgcagaggacggtagaacagccatgccaccagcagggccgccagcaccagcacagccaacaggatcaccatcacgagcagcagatgattcgatgccagatattcgccaagagggagcgtcaccgtggtatagctgtggcagaaggtgagtcctgtggcggcagacatccccaccagcgtgttgcggctgccggccttcagcggtgtatccagattgctgtacaacagggaaccgtccggcgcatagacagccagcggctccactctgctgcacaacgaggaaaaaagcgcttcggcatccagataaagcagcagctcacccagatatccataggagcagggaataaacggataccgcaggcacagtgtgccggatgccgtgcggaccagcgtggcgctggaggcgccggcaggccccagggcctgcgcggaaaagtcttctgccgtgggaagctctgccagcaggcctacgtcaccgccggaggaataggcggagccataatggttgcacagcagaataacgtcggtgacgtagcgtgtgtcagctgcgaaagacttcagctcggtgacgatccggaagttccggggccgatcctgcgtgtctggaaacagtgctgcgtacagaacctcatcattccacgtcagctgttccgccgcatcgcagagcctgccgaaattttcatcggacagctttgccgccaaggtgagaaaggcctcgccgctctcgcgtgcactgccgagcagcctctggtaggcattatggtaaagccagatctgaaagagcagcataacggccagcagcagggacagtatggtaaagaaggtgctgcgcagaacgcttcccgaccggaagaattcatgcctcagcgcatcgctcagttctttccgcgccacttaaaatcacctccgccacttgcagcagacgccttgacaaagaacgtaatatggtaatcgatggtaaatgaatcatatcaaaaaatgtgcatttccgcaaggagcaaaccgcacctgctttcgcaaaataggatgtcctatctaaagtgcacatttcccctgcatgccccgtctttttgcactttttttaagcagtttacgaaaaaagaccggcttttctcctgcgttggatcggtgaattgcacagttttttgcacggatgttcggcgattcgatgctaaacgattttttcggcatgaacaaaacttgcgaagctgttaaatatttgccaggacacggcggtatcacgatctgggaaagaattgtttattgaaaatgatcagcgtatgagatacatatgcaaagtacagagggccgggcatgccggacgcaggtccatccctctgcgcagacgatacgtcaaagagaaattgagaaatgactatgagagaggtggtccatggaatgaagaagaatccctacaaacgggtggcgagaggtctggccgtggcggagaagtggatcatcgttgttgcgcttgccatcggcgtggcgctaacagcggtgaacgttgtctgccgctatatctttaaggcggatgtgaacctctcgtggtccgaggaaatcgtggtagcgctgctggtgctggcctacatggtcggcgccgccctgtgcgccggtgaagagggcggcctcatcaatatgacgatcttcaccggcaagatgagccgccgtgcacagctgaccattgagatcatcaccaacatctgcctgatcgtcttcggtgtgatcattttcatcagcggttgggatcgctgcgcggtaaagatcgccagcggacaggtcaccacggcgctggctgtgcctgactggatctacaacgcatttatcccgctgggcgcgtttctgatggtgatccacacggtggagcgcatcctggacgggatcgctgagctgaaagagctgaagagcgcagacatgacgaagggaggcgatgctgcatgacgtatgccattatgctgggtgtttttgtgatcctgctgtttctgggtgcaccgatcgcactgtctctgggtatgtcctcgctgctggccatcctgtataatgggacgggcatcaatgttatcgccggccagatctatggcggcatcggcaagtatcttctgctggccgttcccttcttcgtcctgtccggcaacatcatggcgaaagccgggatctccgacagactgattgccttcattgacgcgctgctggggcacctgcgcggcggcatcgcaatggtctgcgttgtggtggcctgcttcttcggcgccatctccggctccggcgcggccaccgtggcagctctgggcgttatcctgatccccgccatgatcgagcgtgagaaattctccgaccccttcgcacatggcgtggtggctgccgcttcctctattgcggtcattatcccgcccagtatttcgtttgtgatctatgcgtccctcaccggcgtttctgtgggcgacatctttgtggccggtattctccccggcgtcattatgggcgttgccatgatcatcgtggtgcagatctatgcccacaagcaccacctgaagcccgcccacccctggaagggctggcgcgaggtgtggcgcaccttcaagagcgccttctgggggctgctgatgcccgtcatcattctgggcggcatctatggcggcgttttctccgctacggaggcggcggccgtggctgcggtgtacggcctgttcgtcggtaccgtcatctataagaagctgaagtggaaggatatcgtggagcttctttatgatacggccaagagcaccggcggattgatgctcatcatcggcggcgcaacgatcttctcctacgcctgcacgcgctatggcatttccaccagcgtccaggctctgctggagaactgcggcaagggcggcttcctggtcatcatcaacatcgtgctgctgattgccggctgctttatggatgcgaactccaatatgtacattttcgttcccatcatgtatcctgtcgcgcgggagttcggcattgaccccattcaattcggcatgatctgcacggtcaacctggccatcggccagttcacgccgccggtcggcacgaacctgtttgtcgcctccagtctgcgtatccccggtcaccgtgtcggtgtggagggcgtggccaaagcgtgcctgcccatgatcgcggcggctgtgctggtgttgctgctggtcacctatgtcccgcaagttaccacgtgcctgattggcgcatgactttctctcccccccttgccgcctgcctgcgtacaggcaggcggcccccgcccaagcatgcaccatatcaaaatgatttattttaggaggaactacttatgaaagcaaaaagatttctggccctcattttggcgcttgtcatggcgctgagcctcgttgcctgcggtgatagcggcaaaacccctgctgcggacggcgacagcaacggcggcggcgattccagcttccccaagatgacatggaccgccgctacctccggcgccgagggctccaactttgacgtcggtctggagaagttcagcgagctgctgcaggagaagaccaacggcgctgtgaagctggacatctactgctccgaccagctgaccaacggcagtacggcggactctgtgcaggcctgtatggacggcaccatcgatgtgacgttccaggccgatggcatttggggcaactttgacaccgtgttcaacatccccaacctgcccttcctctttgacagctatgacgatgtggacagcaagctcatcaatggcgagggcggcaagtacctgatgaaggctatggaggataagtacaacgtcaagtgcctgggcattggcgaaaacggcttccgctacctcaccaaccgcaagcaccctgtcaagactcctgacgatctgtacgatctgaagctgcgtatcggcggcgctcccatcctgatcgccacctatgagagctggggcgtggactacaccactgccggctgggctgaggtctacaccggcctgcagaccaagctgtatgacgggcaggagaaccccatcgccgttgccgatgccagctccattcaggaggtgcagaactatgtgaccgcgtggacggccaactatggcatcatgttcatggtcatcaacggcgacctgtacaacagcctttccgatgagctgaaggccattgtggacgagtgtgccaaggaggcctgcacctatcaggtgcagtatacccgcgacgagtgcgaggcggcgctgcagagatgggtcgatgactacggcatcgaggtctacgagatgacgccggagaacgcggagctattccgcagcaaggctctcaaggtgtatgacaagtacacggattaccagcagctcattgatatgctgaagtaagcaaggtgcggtttgcctgtgtggaaaaggaacctgcatttgtgggaggaatgatcatgaacattggatttatcggccttggaaacatgggacttcccatggcgcggcggctgctggagaaaagcggctgccctgtgtacggctttgacattgtgcctgccgcgctggaaaagctggcggcggccggcggtacgcctgagccggacagcgcagcgctgctggaaaaaagcgatgtgatttttctcagcctgcccagcaatgagctggtacaggcaaatctggaggcagccgttcagcattgccggagcggcgccgtggtcgtggacaccagctcctcagtgcccgcggtcatacaacgctgcgctgcgccggccgctgcgcggggcgtcgagctgatcgactgccccgtcagcggcggcgtagacggcgccgagaagggcacgctgagcgccatgtgcggcggcagcgaggcagctgtgacacggattatgccgctgctgacctgctttgccgcccatgtgacgtacatggggcctttgggcagcggctatgctgccaagctgatcaacaacctgatcgttggcggtgagatcacactgatcgccgaagcgttcggccttgcgcgccgggccggcgtagacctgacacggctcatggaggcgctgtccggcggcgcagccgccagtcccgttctgacgatgaagggtagcaagatgatcagcggagattacacagcatcctcccgcgtgctgatccacctgaaggaccagcacaacgcgcaggagatggcacgcgctctgggagccgatatccccgcctgcgatttgtccactttgctgctggagaagctggcggatatgggtcgcggcaacgaggatgtagcggcggtcatcgacctgttccaatcaaaagtagatcttaggaggttatggaatggcaacctatgaaaaggaatttcttctgaaggtcctggaaaacctttggaaggtccgcaaatttgagcagcgcgccatggagggcggcctcaagggtgagatcaagggaaacatccacgtctgcctgggtgaggagggcgccgttgtgggcgccaatatggcgctggaatccacggattatatcacggccagccaccgcggccacggccactgcgtcatgaagagcgatgatgtggagcatacgctggcggagctttacggtaaggaaagcggtttctgccatggccgcggcggttccatgcacgtcacaaaggtggaaagcggtctgctgggcgccaacggcatcgtcggcggcggcattcctctggccacaggctcggcgttggcatccaaaatcaatcgggacggcgcggtatccgtggcattcttcggcgacggcgccaccaatcagggctgcttccacgagtgcatcaacatggcggccgtctggaagctgcccattgtttatttcattgaaaacaaccagtacgccgtgtcgaccaacatccacaccacctgcgccacctccacgctggcccagcgcgctcagggctacggcatcgaaggcgatgtggtggacggcacagatgtgctggccgtctatgaggcgatgcagaaggctgtggcccatgcccgcagcggcaaggggccggtgctgctggagtgcgatgtctatcgctacaccggccattatgtgggagacccgggcaagtatatgtccgaggcgtataacgcggcggctcatgaaaacgatgtgatcaacaaattcaaggcatacctgctggcggagggcgctgccacacaggcggagatggatgccgtggaggcggcggtggaggcgcgtatggaaaaagcgtatcagtttgcgctggagtccccgttgcccgatcctgccgatgtgctgaaatacaactatgcctgtgacaacgaaaggagtgttgttcgatgagccgtaagactactatgatcgctgccatccgcgaggcgatcgacgaggaaatgctccgtgatgaaaacgtgatcgttctgggcgaggatatcggggagctgggcggtcccttcggctcgtgtatcggcctgctggacaagtacggtcccgaccgcattatcgccacccctatcagcgaatggggcttcaccggcatcggcgtaggcgcggccatgcgcggcaagcgccccatcgtcgagctgatgtacaatgactttatctccgtctgcctggatcccgtgatgaaccaggcggcaaagctgcactatatgaccggcggacaggtcaagatccccatggtgatccgcgcgcccatgggcaccggccgccgcggcgcggcgcagcactcccagaacatggaagcgctgtttgcccatattcccggcctgaagctggtgtgcccctctacgccggctgacgccaagggcctgctcatgaccgctatccgcgatgatgaccccgtggtatttctggagcacaagctcctctacccgcagaaggtagagatgccggacgatgttgcgccaatcccgctgggcagcgccaatatccgtcgtgagggcagcgatctgaccatccttacgtgggcccgccaggtcaacttctccctggaggccgcggaaaagctggctgccgacggtgtgagcgcggaggtcgttgaccttcggagtctcgtcccgctggactgggatactatccgcgactccgtcagcaagacccaccgtgtactgatcgccgaggaggatgtcaagcgctgcggcttcggcgctgagctgtccgcgcagatcatggaggagttgtttgatcagctggacgcaccggtgcgccgcgtggcggcactgaactcctctgtgcccttctgcgccgagctggaggacgagatctatcccaatcccgagcgcatcgccgccgaggcagccgctctgctaaaagaataaggaggcacatatggcaactgagatcagaatgccgcagttcggcgtttccatggagactggtacggtcgctcagtggctcaaggccgagggagataccgtcaaggccggcgatgtgctggccagcatcgagacagaaaagctgaccaacgacgtggtcagcgaggtggacggcgtactgctgaagatcgttgcacaggagggtgaggatatccccgtgcaggggctgatggcgtatatcggccagcccggcgaggcccttcccgacggcagcggcacaacggcgcccgctgccgccgatacggctcctgccactgtggagcctgtgcctgccgccgtcggtcagatgtccggcggtcgtgtcaaggcatccccgctggcccgcaagatcgctgccaagctgggcgttgacctgtcgcaggtaatacctggcggtaccagcggacgtatccgtgcggatgacgtccgcgcctacgccgcgcaggtcccgacagcgcccgccgcccccgctcccgcccccgccgctgctgcaccggctcctaccgctgctgcggcggagcagatgggcggcgacacagtggagaagctctccggtatgcggaaggtcgtagcccagcgtatgcagcagtcccacacggagatcccgcccgtaacgcaggtcaccaaggtggacgtgacggcgctgatgcagttccgcagagaactgctggaaaagacgggaaagaagtactctgtcaatgacctgatcctcaaggcaacggcaaagtgtctggcagcgcatcctgagatgctggtcagctttgacggcagccagatcattcaccgcgctcacgtcaatctgggcatggctgttgcgctggacacgggactgatcgttcctgtaatccgtgatgccgacaagctgagtctggatgcattggcggcctgtgccaaggatctggcggcccgtgccaaggacggcggccttacgcctgatgattacaagggctccaccttcacggtatccaatctggggatgttcggcatcgagatgttcacgcccatcgtcaaccagccggatgccgctatcctcggcgtcacggcggtggaggatgagctggtcatggaggcggatgggaccatttcaaagcatcaggtcatgcgtctttgctgcaccttcgatcatcgtgccatggacggcgctgtggaggcgcgcttcggtatggcgctgcgcgacctgctgcaatcgcccgtagagatcctgctttgatgcgaggtgcggtatgaaaaagatcattgttatcggcggcggccccggcggatatgtggcggccatccgtgccgcacaactgggcgcggacgtgaccattattgaaaggcaatatctgggcggcacctgcctgaacgtaggctgcatccccaccaagtgcctgctgcactccgccgagctggtggagcagatcaggacgcagggcaaggatatcggcgtagaggtcgagggtgtgaaggtcaacttcccccaggtcatcgcccacaagaacgccatcagcaagcagctgaccagcggcgtagccggtctgctgaagctgaacaaggtcaagaaggtggacggcaccgccaagttcaccggcgaaaagcagcttgaggtcaccaagcccgacggcagcaaggagagcatgaccgccgatgccatcatcgtggccaccggctccgtcaatgcccagccgcctatccccggtctgaaggagaaccccaactgcatcgactccaccggcgcgctgtcgctggacaagctgcccgcgaccatggtggtcatcggcggcggcgtcatcggcctggagctggcctgcgcctacgcggccttcggcacgaagatcaccgtggtggaggccatggaccatatgctgcctatgctggacggcgatctgacgaagatcggggtggcccacatgaagaaaatgggcatggagttccatctggagtgccccgtgcagtccgtggaggacagccccgtgggcgcgaaggtggtctgcaaggataagtccggcaacaccgtcagcttcgaggcggagaaggtgctggtggccatcggccgcaaggccaacaccgccgcgctggatctggccgccggcaagatcgacaacgataagggtcgtattctcgtcaacgataagatggagaccagcgtttccggcgtatacgccatcggtgactgcgtgtttggccatgcacagctggcgcataccgcctccgccatgggcgaggtggcggcagaaaatatctgcggccatgaggcgcactattgcgaaaagaccaaccccacctgcgtgtatatggagccggaagccgcctctgtgggcctgaccgaggagcagtgtaaggcgcagggcattgcctacaaggtgggcaaattccctatgagcgccaacggcaaggcactgatcctcaatggcggcgagggccttgtcaagatcatcgccggtgcggagtatggcgagatcctgggcatgcatatcatcgggccccgcgcgaccgaccttatcgctgagggtgcgctggccatcggtggtgagatgacgttggatgagctcatcgacaccatccactctcaccccactgtcacggagaccatgcgcgaagccgcgctgaacgcggaaaagcgtgccatccacacaaagaactgacggcgcgcagaatggcgatccgtgttacgctgagcgcaaatgcaggcgtttccgtggagctgggcggcgtccgcatctggatagacgcgctccacgatacgcgtgtgccggggttttccacgctggacagtcatctgctccagcggctgtggtccgaagccgcctttcagtcgccggatgccattgtatatacgcactgtcatccagatcactatgcggcgcatttgacggcggaggcctgccgccgctggccgaaggcacggttgtttctgccgcagaaggactttccggagcaggagcttctgtcggggagggaggccgccgcatccatcgaaggggtggcgctgcacttttaccgactgacccacgacggcatggctttcgccggtgtgccgcattacggactcaccatcacctgcggaagggacagcatactgcttcccggtgactgcgccgtggcctctccggagctgcttcccgtggtgaacgggcggcatctgcgccttgcgctgctgaacttcccttgggccacgctgcagcgcggacgggattttctgcgggagcagctgcacgctgaccagatcgcgctgtatcacctcccctttgaggaggatgataccgagggctttcgcgcggcggcagatcgtgccgcacaaagcctatccggcgtcggagccgtccatgtgctcgataatcgctttcagaccctgtttatcccggatgaaacgcagcccgccccgcatagctgataaaaagcaaaagacgtcctgttttcgctggaaaacaggacgtcttttctataaaacggtgtagacgtggaaatcgtcagcagtatgctggggtacactcacccctccagcagagcgcggcagccctccgggagcagatagtcgatctctatacggttcccctcgtagacgcggatttcccggatggcggcggcgactgtggggcgatccagctccgccagctgccccgacgccagcaattcctttacccacggcagacatagcggatcgtcctgcgctgtgccgcgcagcttgtccagttgggcctgcagcgcctgctcctgtgcgtcataatcagcgcggcagcggaggaagtcctccttggagataagcgcgtcctgatagtcctcgtaggcgctctggcggcggcgctgaatgcgctgcaatgcagcttccagcttttggggttggtcggtgccggagcgcgggcgctgcgccgcgccctgctgtgccagctggtggaggttttccacgccggcaatgagttggttcaaatcatccagtattaccttcgtcaacacatcatgggcgatatagtgcttgctgcacacggacgcgccgtagcgcttatacgagccgcaggtgtagaagattttgccaccccaggtggtcttgaccatggctcgtccacaatcgccacacttgagaaagcccgcaaagggactgacattctgctgaaaatccggtgtgcgggcgttggcatgcaacagagcttgtacccgttgccactggcccttttcgatgatgggctgatgggtgccggatactaccgtccactgggagcgctccttccgcttggctttcccgtgcatctgaaggcggtcgtcccgtccctgctccatattcccgatgtacatctcattttgcaggatacggtggatggtagcgtatgtccagtaggtggtggtttccagccggtggttgttgcgatatttttcgccggtgagccgtttgtactcactggggcaggggatgccctcctcgttcagctgcttggcaatacggatctttcccattccgttttcgaacagggtaaagatgcgccgcaccacctccgccgcaggcgggtcgatgaccagacggttatgattctgcgggtccttacagtacccgtagctggcgaaggccccgatgaactcgccccgctgctgcttggcgtggagggagcttttgaccttttgggagatgtcgcgtgcatactgggtgttaaacagattcttcagcggcatcatcatgtcgtaggcgccgcggtcgctgtcgatattgtccgtgacagcgatgaaccgcacaccgtgctccggcagccaacgctccagatagcggcctgtttcgatgtaatcacggccgaaacgggacaggtcctttaccagcacacagcggatgcgcccgttccctatgtcccgcagcatccgttgaaaggcggggcgctggaaattcgtgccggtatagccgtcgtcggcatagcattccgccatcaccaactcaggatgattttcgatatacgcctccagcagcttccgctggttgccgatggaatcactctccatccggtctccgtcctcccgggacaggcgacagtacagcgcagtaggcagtaatcgcttctccataagtcccctcctttccgtagactgcccgcaggcattaagccgcctgagtatgggcgcggatcaattccaacagcaacgtctcagctgtctgttgaccaaggaaattgcgagtgacggtgatcgtcggggcgggtgcttgctgaacggttggcataaacagacctcctgtttgagaatagtccatcgtatgcgcgctacggaaaccgtatgtttatcggtatagtataagaaaatgacagctgattatgaggcagagcaggaacggttaaagctcgaaattggagcaacagaagtaggcggccaacgtaaagttcacaacatgagcaccgtaaaatcttagagaacgcgtctgcgcagtatgtctcggttcgtgcagtatagcgccgtttcgctactgccattcttgcatttctttggctggaagttgctgtttgccgcgcatcttcgtcaagagaatatatgcatgatcgtttttggacagggcgcatcgcagaacacgttgcggtggggcagaacttgtgctatacttggagcataattggcaaggagggggacttatgaggagaattatctgtatcattttagcctttaccataacactgctgtgcggctgtggaagccgaagcaacggagatgacacacaggactacggcggaaacacacagcagacggaagaattcgtcattacgcccatggcgtccgggctggagctggagccgtatacctgtgcagatttctctatgagcgttccggagggctggatggtggaggcggccacgtccaacgcgggtatgtaccacgctttgcgagcgtatgaccccgcgtgcagcgtaaatcagattttgtatatcttaaaggcagagccgctgtttgcggatgacttcctgaagcagaattatacatactggaacgctgcctacgcagcgttccccgtaatggcagaggagtccgtgaagggttacttcgacgtgctgccgcagtatctgtcggcggttgccgcagagccgttttacagcagcctccacttcccgcagtatgaggatttcacggtgacagagacctttgacgcgaccggctctttgggcgggacagccggtgtgctgcgtgcagaatttacgcaggacggcgtcgaggcggagggtatgtgctccgtggagcttgtgcccttccccatccccggccttggcgggtactacatggcatacagcaccaccatcgtctccgctgaaaaggggatgttccagaactgggaggacatcctgacacggagcttgggcagcctggactattccggcagctatacttcctccgccatggcgcagagcgacgcggcgatgcggcaatcccagcagttaagccagtccgccaatgagatgcaggatgccatcatgtcctcatgggaaagccggaataccagtcaggacatcatcagccagaagcagagcgatgccaccatgggctttgagcgggtgatggacacggagaccggcgaaatttatcagacggacaacggctttaccgattggtatgacggagagcggtatacggctatcacggatgaccagtacacggaggccgttgtgggtcggttctcgtggaagtaaggaggacatttacatgaagaagatttttgtgttgttgctggccacagcaatgattttcgcactggccgcctgcggcgcaacgcccaatgggacagacaataataacacacaggacgaccatcaggccgagacgcccgacgcgtcttatgaagcacctcaaatcaccgaactgtataacgaggacttcgactataccgacggcgtgggcaacagcggccattatgcctaccgcgtgccccaaatcgaggcggacacacagggcgcggaggccatcaacaaggccatctccgatgcgtacaccccgatcgtgaatggcgtgcttgaagatgtctcggataaggtcagcctgtcctgtttctatgtggcatgggagtcatatcagtatgagaatatcctgtcgctggtcgtctcctgcggttgggatgccgatgtgaacgaatacaatgtctatctgtatgacatcgtcagtggccagcagctcaccacagcgggcttgctgaaggcactggatgtggatgagacagccttcttggaggcggtacgccgcgctgccgctgcaaagttcgacacacagtatggagcaattgcgggcggtgatacggatgagttcctgacggaacgccgcgattggacgctgtccgatgagaacatcaacatgagcgtccgcacatacgctgatggtgacggaaagctccacgtggtcttgcccatcggctctatcgccggtgcagattcttatgagcaggtactgtcgctggatgacatcggcgagtaaacacagctctcccgacacctgaaacaaaaaagcgctcctgcgaggtcgatcctcgcaggagcgcttttcctataccggcagcctcagacccgaagttttgagcggagagcttggcagcgtaacatactccagcgagccggttgcaaccgcacgagcaccggcagatgcagccttacagccggaagcactttttcagcgccgtatactcgcccagcaccagcagcgtcaggctgctgtccagcaccgtttccggcgagatggtcacattggttttgccgtctcgcttcacgccgaggatgttgacgccgtactttcggcggatgtccagctcaccgatgctgtgcccctgccagctgtccgggacggcgacctcgataatggcgtgcttctcgtccaactctatgtaatcgaagatgtggtcggcggtgtaccggatggccgcccacttcgccagctgcttttccgggtatgtcaccgcgtccgcgccgttgcgcagcagaaattttgcctgtacatcccgttcggcgcgggacaccacatatttcgcccccagctccttgagcagcgacgtcgtttccagcgagttctggaagtctccgctgatggtaacatagcagacatcatagtttccaacgcccagcgagcgcagaaaatccacgcgggtgctgtcaccgatctgcgcgttggtgacaaagggcatacactcgttgacgcgctcctcgtcccggtccaccgccatgacctgatgccccagctcgctcagctgcatggcaaggtgccgcccgaagcggccgagtccgatcaataatacgtttttcatcgtgcgctcctttcagcctacggtgatcatttccttcggataccgggcataggtcagatcatgcccggagaaagcggcgtagatcagggtaagtcccccgacacgcccgaagaacatcagcagaatgagaatgctctgcgacagcgtacccaactgcggcgtcagccccagtgtcagccctaccgttccggcagcggatgccgtttcatagaggcaggcaccgagcggcaggttctccgccgcgctgatgaccgccgcacccgcgaaggtcagtcccaagtacagcagcaggatggcggcggcgttccgtacagcggagggctccagcctgcgcttaaaaagctgtgggtcctcccgccttcggaaggcagcgaccgcgttggcggccagcacagccagcgtcgtcaccttcatgccgcccgcggtggagccgggcgcgccgccggtcagcatcagcaaaatcgtgaccgcctgtgaggtgtcgctcattttcgtcaggtctgcggtgttgtagcccgctgttcgcggcgtgaccgcctgaaagagcgacgccagaacgcgctgtcctgcgggaagctctgcaaagtctgtcaggaagaagagcaatgccggaagcgcgatcaggatgacggttgcgctcagaatgaccttgctctgcatccggtaccgccgcaggtgcagccgatgggtgcagacatcgtcccacgtcagaaagccgataccgcccacgatgatcagcagcataatgacgatgttgactagcgggtcggatatgtaggccgtcaatgaagggtagagcgtatccgcccgccccagaatgtcaaagcccgcgttgcagaaggcggaaacggagtgaaatattgccatccacacgccccgcagtccatagtcccggcagaacgccggcagcagcgcaagagcgccgaccaattccacaaagaacgttcccttgagaataaaccgcgtcaggcgcacgatgccgcccaccaccggagcggaaatggcatcctgcatggcactgcgctccttcagcgagatattcttgccggagagcatcaaaaacgttacagccgccgtgatgacgcctaagccgccgatctggatcagcagcaggatgacggtctgaccgaagccggaccagtaactgccggtgtcctgcaccaccagccccgttacgcagacggcggaggtggaggtaaacaacgcctcgtgaaacggcgtccatgtgtggcttgcggtggcgataggcagcatcaacacaagcgcgcccagcaggatgacgcccgcaaagccgaggatcatgatctggaaggacgtcagatggcgtttcagatggaaaccggtctctgtcacaggactcacctcctaaaatcgactgcgttcccaatttcgcgtacagtatagcacggttttcgcgtttcggctatacacattttgttaagatttcggctcagaacgaccgagaacaactgtgaacctttctttaatttttacagaaatcattgcaatttctttacgtttacagtatgatatgctgcgcactaatattttgacaaatttcgcaggcttttctccgagaaaaagtctgctgcgggagatatatatgctgaaaacaaaatccaatgagataacagacacccatcaggcgccttgcgaggcgcctgaaacggcggagggcctccgccgcagcatgtggcaggcgtggctccgcagcctgctgctgttctgcggcgccagcgtctatgtggagctgtgcctgcacctgtgcgtctaccgatcgctggacaggcgggcggtctatctggtgctgttcggactgctgggcggcacggtctgcacgctgctgaccacgcacctgcccaagatcgcccggcaaatcgcgggcgtgcttctggtcgccgtgcaggtgctgtttgccgaggtgcagctgatgtaccacgccattttcggcaacttcatgcccatcagtcaggtgagcatgggcgggaacgtcatcaccaatttcgactcgcagatcctgtacagcatcggcaagaacatcgtgcccatccttctgctgctggtgccgctgatcgtgacgatcctctgccttgctctgcgcaagctccgggtgctgaccgtgcggctcaagtggaggcaggcgctggcgacgctgggcatcctgctgacgctgttgctggtcaccacgggcattatgtacgccgggcggggcaagtcgttctccgtctacaagaccttcaccaacgtgaacacctctaccgacagcagctataagagcgtgggcatgctggccaccacggtgcaggagcttcgctatatggtcttcggcagcagcggcagcgtcatcatcacgccgtccccgctgggcacagccaccaggcagctctacagcagcaattcctacaatgtgatcgagagcatcgactttgcaaagctggcggagtctgcggataacatcatgtgcaggaccacggatgagtatctggcgcaggtggtccccacccggaagaacaactacactgggcttttgcaggactacaacctgatcaccatctgtgccgagagcttctgcccctggttcatcagcgaggagctgacacccaccctgtacaagctgtcccacacgggcatcatctttgaaaactactacggcacgttccaatccgtcaccaccaacggtgagtacaccatgtgcatgggactttacccggatatgtcccgcaccaagaccgattccagcttcaacgtggcgggcaccaactatctgcccttctgcctaggcaacgccctgaaggaaaagggctaccagacctggggctatcacgactatatcggagatttctacaaccggaacatcacccacgccaacatgggctataccttcaaggcggcggactccgggctggatataaagatcgactggccctcctccgatctggagatgatggaggcctcagtggacgactacctcaacagtgagacacctttccatgcctattacatgaccttcagcggccactatcagtacaactgggacaacgccatgagcgccaagaaccacgacgcggtgaaggatctgccctattccgagccggtgaaggcgtatatcgcctgcaatctggagctggaaaacgcgctgacctacctgctgcagcggctggagcaggcgggcgtggccgataagacctgcatcgtactgaccaatgaccactatccctacggcctgacggaggatgagtacaacgagctggcggggcgggagatggatctcaccttcgagaagtaccgcaacagcttcatctgctatgtgcccggcctgtccgagaacatcgtggtggacgagtactgctccacggcggacatcctgcccacgctgctaaacctgttcggcgtggactacgactcccggctgctggcgggcaccgacgtgctgtccaacggcatacatatggcggtgctgtcggacaagtccttcctgacaaagaccttccgctatgacgccggtacggagacggtgatccccgccgacgagagcatcgttatttctgacgagcagctggaggcctaccggctgtatgtggacaataagttccagatgtccagcaacatcgtcaacagtgactactacgcccatgttttcggcaaggcgtccagcggcggcacgctggaggatacggtggtgtttacggacatcacaggcattttcaaccaggccagcgtcctctatatgtaccgcaacggatatatagacccggaaacgccggacaccttcggcggaaaggccacggcaaaggtgggcgaattcgtggatgtgctgtaccgcatctcccaaaggccggagacggacaacaccgccctgccgcccgattatgaaaccgaggaattcaacagctccgcctgcccctactacgacgccgtgtgctgggcgtatcaaacggggctgctccgtcagggcgatctgcatacggcctatgacgacgacatggattaccagacggcctgcctgctgatctatcgctacgccgccatgtccggcattgacacccgcgtagatcaggagctgctgcggcagaccatgtgggaaaatccccggctcagcggcgaggtcgtcaaggccatgctgtggtgtgacgatcgggatatcaccacccgcgacagcggactgagtgagctgctggcggcctatgacacccatatcagccgctatcagatgacctcgttcctgttctatctgtgtacctatgagctgaactcgcgaagcgaagcataatgcagcgttttgctttcatagacaatgcaaaacgtttttttgcccgcgcgtgacgttggcacccttgctttttgacaggacgcagaatatactgaaaacaaaaaagccgaggtatgcacatgaacctgttgatgacattggatcggaactatgttccgcagctaaatgtaatgctgttctccgcgctgcatagtgacagcgccgcgcattttgacgtgtacctgctgcacgacgagggactgtcggaggcggacgtggcggaaacacgaacgctgctggggcagcggggcgaactgcacctgatacgagtggacgaggacggtctggcggacgcgccgacctccgaccgctacccgaaagccatttactaccgcatttttgcggccaaatatctgccggacacgctggatcgggtgctgtatctcgacccggatattgtagtgcgccagagtctgcgggagctgtatgagatgccgatgggcacggcgttttttgcggcggccacccatatccgcggctttctgcaccgtttcaatgagctgcgtctggacatggacgaggacagtccctatatcaattccggcgtcatgctgatgaatctgcaggcactgcgggcggagcaggatacgcaggcggtattcgactacatggacgcccacaaggggcggctcatgctgccggatcaggacattatcagtgccctgtacggccagcgcatcctaccgctggatcccatccgctacaacatgacggaaaagctgtttgccctccaccggcacaacggagacggcatgacgctggaggacgtgcggcgagggtcggcggtcatccactactgtgggcggaacaagccctggaagcctggatatatgggggaattgaacgtgttttataatgaagcagtctctcaaatgtcagagaacggtcatcattgaattatttttgtatcatatatggcaataaagtgcggcagttcagcaactgaactgccgcacttttgcatcaccccacgcggcgtcgaagctgatggcacagaccttctggctgcgctccacagagtagatgggcagctgccgagtcgtggccgcagcgctgacagatgctgggtagttcaccgcgtaaaaaatggccgcagcggccagcagcgccgcaccgcccaccatgtaccagcgccgcaggaggagtattttgaccttgctcataaaacgtgcgcccctttctgttttttgccctatcctatgccgctcccggtggaaatatatcccgcggcggtgcctcgcagcctgccggccgcacagggaaaaggaccgtccgtttgaaacgggacggtcctttgtatggagggggcggggcacaaggagtaagcgccgccgcggaggaagataacttatttacgcaggaacaggtcgatcttagacttggcgcgggccttgacgctggctttaccggccttgaccatctcgtagtagtcgccattggcagagccgctgagcaacccttccacataggccatgcggatctccgtggcaacattgatcttgcgaattccgatctcaatagcggtctggatcatatcgtcagggataccggaaccaccgtgcagcacaaggggcacatcggtgacgtcacgtacctcctgcaggcgctggtacatggtgggcggtgcggcgctgctgccggagcactatgacggcgagatactcctgccgtttttcctggagggcggcagatataccatagacaacgtacactatgtccgtgaaggtgacacgctggtgcctgccggcgagacggaatttgcccgggacaccactttcgcctatcgcgcctccgacctgacggaatggtgccaggaaaaaaccggcggcgcctaccctgcggagcaggtggtatccatctcgcttgacgagctgcgccgccgcgactatgacgccgtctgcgaaaagctgatgggcgtttccggcttcaacaaagtggtggtcaacgccgtatgctatgacgatgtagcggtgttcgttaccgcctatctgcgcgcggcagcccggggtaaggtatttatgttccgcggctcggcagccgtggtcaaaatcctgggcgcggtgagcgatcagcctctgctgcagcgggaggatcttatgtgcgccgaccagcggaacggcggcatcattgtcgtcggctcccatgtccgcaaaaccacaatgcagctggagacactgcaaaagggctgcccggagatcgaatacatctgttttgatgtgaacaccgtatttgacgatgccgcgttggcggcagagcgccggcgtattctggaccgtaccaacacactgttggcagacggcacgaccgtggcggtatacaccagccgtatggtcctgcgctctgaggatgaccagcgggaaaaaaatctggcgatcagtgtgaagatctcggatgcgctcacatcactggttgccgacctgacagtgcggcctgcctttgtgctggccaagggcggcattacctccagcgatgtgggcgtaaaggcgctgcgggtacactgtgcgcgggtccgtggtcagatcgcccccggcgttcccgtttgggagaccggcgaggagagcaccttcccgcacacgccctatatcatcttccccggtaatgtgggcacagagggtactctgtgccaggtggtacagacattgctcaaaaagtgatgtgccgcccacaatatacgaaaactaagcaaagcaaaagaaagaacggatgtctacagaaaggcatccgttcttttgctgcggcaggcccgggacggatgaccgtcccgggcctgctggcataaacggaacaggaaagctgcgccgtttgtcttcagttctcctcagcagccgcagccttggcggccttgcgcttcttgattgccgcgctgattgcgggggacaccagagacgcaatggccagcacgatgaagataatggcaatggggtgctgccaaatcgtctcggaggaccccagcaggtcaatactgcggcgggcatttttctctgccagggatccgaggaccaggcccagaatgataggtggcataacaaagtccagcttgatcaggacaaagccgatcacacccatgatgagcatcaggaaaacttcctccagatagtggttcaatgcgaaggtgcctgtaatgcagaatgtcatgatgacaggcaccagatatttgttgggtacatcgatgaccttgccgaaaacacgaatcatcgagaaaccgcaaatacccatcaggatattggcaacaaacagagcaatgaacacgatgtaagccttgccgggttcctcggtgaacagggacggcccgaagacgataccctgcatcgtcagcgcacccatcatgaccgcggtaccggcatcgccggggatacccagagccagcaggggcacgaacgcgccgccggcgatagcgttgttggcggcctcggaacctgcgataccctcgggggagccgtggccgaacttttcgggatgcttggagaagcgcttggccatgttatagcccacccaggaggcaatatcgccgccggttccgggtacagcaccgatgaaggtacccagaatggaggaccggaccaccgtgggagcgatggtcttcaaatcatctttgcggggaaagacccgttcgattttaacgcgctcatgcagcggctgctcgttgtatttctcctcaatggtcttgagcacctgtgcgaaagcaaacacgccgatcaagatggggatcatagccagaccgcccttgaggaaggagccgccaaaggtaaagcggtacgtgccggtaaagttatccacacccacggtagcaaacagcaggcccagaataccgcccatcagacccttgatcacggattttccggacacactagtgatgatgctaatgccgaaaaaggccagcgcgatcagcatgaccttgctgcggcagcccatcagatattcgatcgcagggatcataatgagcagcgccagcagcataccgacgatcttcatcaacaccacaaagctcacaacaattcccaacatgatgtacacatggatcattccggggcttttccaatcgatagccttcttttcctcaccgggttctttttttagcgccgtttcgatgatcagtgccacagacagcagcgccagcgcaccggccagaatgcaggaccataccgcgggatttttctgcgccgggtatgcggaggcgatagggggtgacaagccgcgccaaatatgatacactgatatggatgaccgcaaggaggacaccaccatgcatatcaactggttcaaggacgaaaatcacctggtctatatcaacggagagacacagctggcagagctggaacggacgctgcacttccccggtctggcggacgccgccaacgagctgcggcggcaccccacagcggagggcttcaccatcaaggggccaaagcgcaccagcggccgtctgttcgtgccggatctgaccttcggtgagcacattgagatgggcgaaaacattttcttctatatgggagagatgcaggaatgctacgtcatctactggctggacgctccggtagcacaataagcggaaaagggccgccccgttcggggcggccctttcatgtcatgtgcagccgttcaatcgctggcgccggtatgcacgaccttgcccatgttccacagcagcgccacgcggcgcgcggactccagacgttcctcgggcgtgcggtactcggcgtgcgccgtctcggccccgcagtccatgcaggccacggagacggaccagccctgctcatcctgcatggcacccacgccgcggcagatggggcagtcctgcaattcaatatcaaaaatcgggtccatgtacatcctcctatgggtcaggttgggctcagtatagcgcatatagcggggaaaggcaagaaaaatatcccccctcccctgccatgcaaaaacgccccggcgcctttcggcgccggggcgtttcgctcctgttactgaatggagatggcgctgttcttgggcagctgcttcttcacattcttgggcacggagatggtcaggatgccatcctcaaacctggcgctgacgtcctccggctccaccgcatcgcccacatagaagctgcggctgcacgcgccggcgtaacgctcctgacggatgtacttgcccttcttatccgtctcgtccttgtccaggcccttgaccgcctgaatggtcagcacgccgtccttcagctccagcgtgacctcatccttcttgaagcccggcagatccacgtccagctcataggtatcctccgtctcgcggacatcggtacgcatcaggttcctggcgtgcttgccgtacagcgggtcacggccgcggggcatcatgccgaagggatcgccaaagaaatcatcaaacaaattctcaccaaaaatgctgggcaacatatgtcattcctccattcgaagctctccacgcgctacggctcacgccgccggcacatggctgtcaccactgatttgtatacatttcatcgcccctcggaggttcgcttccgtttccctccctcaaggttcggctttattataacgccgattttagcactgtcaataggagagtgctaatgttcacagaagtcacgatatttgttcacaaaatatgcgatttctctggcgcagtgccgtccgccgtgatacaataggcacaacatcccatgcaggaggacagtttatggaacagttttacgataaggtcagcgcctccgccgcatacatccgggcgcacatcccccagacacccacagtgggcatcattctgggcagcgggctgggtggtctggtggacgccatgacggacaagaccgtcatcccctacggggatatcccccacttcccctgctccaccgtggcgggccacgcgggcaatctggtcatcgggcggctgggcagtcaggtggcggcggcgcttcaggggcggtttcactactacgagggcttcagcatgaaggaggtcacctatccggtgtatgtgctggcactgctgggggtaaagaccctgatcgtcaccaacgcctgcggcggcatcaaccggacgtttgtccccggggacctgatgctgctgtcggaccacatcaatatgctgggcgccaactccctcatcggtcccaacgacgagcgcttcggcccccgcttcccggatatgacagaggcctatccccaccgcctgcgggagaaggcccatcaggccgccggggcgctgggcttcgcgtgcaaggagggtgtgtacgctatcttccccggtccgtgctatgagacggcagcggagatacgggcctatgagcacctgggcgctgacgccatcggtatgtccaccgtaccggaggtcatcgccgccaactatctgggcatggcggtgctgggcatcgcctgcatcaccaacatggccaccggcatcgccagggagaagcactcccatcaggaggtgctgcgtatcgccaacgagagcagccagaagctctgcgcgctggtagagcgcgtcgtgcgagagctgtaacgcaaaaacgccctcccggcgggagggcgttttctttttatttctcgttgacgcgcagctccagcacgtcgggacgggcgtagtggcccacgcagtccagctccatacggctggcggggaccttctgcatatccaggtcggcgtagatgatgtcctccttgtcccagacggtgacggaggcctcgtggccgaaggggtcgatgacgcagctgccgccccggcaggcgatgtccggcagggccgcgatctcggcggtgccgctgacggtctggggatagtcgctgcggcggaagaccagatcggcgttgataaagtagcagtgaccctcgatggcgatgtggcggatggtgtcctgccactccggattgtcgttggtattgggggagatgtacagggatatccccttctggtacagcgccacccgggccaggggcatataactctcccagcagatgagattgcccatggggccccagggcgtgtccatcacagggaagtaatcccggtctgcatcgccccagaccacgcgctcgctgccggttggcttgagcttgcggtggttcagggcctcgccctccggggagatcatcatgttagcgttatacagcgtaccggtgacggcgtcgcgctcggaatagcccatactgatatagacacccagctccctggcgcggcggaggagcttacgcatctccggcccgtcggccagcagggagttgtcgtagtacatcttccagtcctcgcggcccacggccttgcggctgcccacggtgaagccgaaggtcatgccgtaggggtagccggggatgaacagctccggaaagacaatgagctccgcgccctcgccggcggcctcgtcgatgagccgcagggccttctcaagacatttgtccttgcggaacatcacaggggtggcctgcaccaccgccacgcggcaggtgttcttcagatctcgcatgggtcgacctccttgcagaatgataccatgattataccagacggacacgccggaacgcaacaggtttcggcgcaagatgcagcagctgtcgtacagcggggcgaattccgcctccatgtgcaggcggtgcgtgccgccaacagcacgcaccgcactggaagccaggatcgtttccgtctgtgcatcatacgcccagttctctctgttcgccatgaaaagagacgggcggaaggggtcggcaaacccctcccgccctatggaaagcagacggctgacgccgccccgacttgaccgcaacagaaatgcccatccctctgcagggataggcggtgcgttttggtaagaaaaaacgccgtttctgcatcgcaaaaacagcgtggtccttcctgtggtgccacacggagaaaacgcccgctgtgcctggtcctccgacgtgcaattcttctgcctcgcgccgcggagctctcgctccccgtctgccgcctaccttctcaggctcacgcccaatggctgactttcgtcacacagctctcgctgtttcggtgcatccttgcgctcacagtgccgttcgcggtgggttttgacccatttccttttaggctgccgcctgaccagacctggcctttgcagcgggcagccgcacgacttcaccggaccctattcacttaacagtggtagtataccaccagaaagcgccacttgtcaacgacattcgacgaaaacgcagcgacggcccattgccgcttatatacaccgacccccgcggctgacgccgcgggggtcgcccaattccttaatgatggaaatttgtctgctgcaccggctccttctccggcaggcccagctgcgccttgcccagggcgatggacttcatcagaaaggccatgttgcggcccagggtccgcatggtctgcaggccctccttgtcctggcggacctcctccggcgtgttgccgtagaccatgttccagtactggctgctggccacgggcataccgcagatggtgaagtacttgttcagcgcgtcgaaggtggctgtgttgccgccccggcggcaggacaccaccgacgcgcccaccttcatggtcttgtcgatgtggggcgtgctgaaaaacagccggtccataaacgagatggccccgccggcgggggaggcgtagtacaccggcgagccgatgaccagcgcgtccgccgcggcgagcttgggcgctgtctcgttgaccagatcgtcgtacacgcagcggtgggtctttttgcagctggcgcaggcgttgcaggcatggggggtctttcccgcctggatgatctccgtctcgatgccctcgacctccagcgtgtcggccagctcacgcagggcggtgtaggtgcagccgtgctcgtgggggctgccgttgatgagcaatgccttcatatcctcacctcccggctcaatagccgaagatcatggagcgcttgatgtcgctgagcttatgggcaccgcacatggccatggtatcggccagctcggccttcagcttgtccacgtagacctgcacgccctcggcgccgccgccgtagaccatattcacgaaggggcggccgatgagcaccgcgtccgcgcccagggccagagtcttgaacacgtccatgccggtgcggataccgccgtccaccagaatcgtcatcttgccgcccaccgcgtcgacgatggcgggcaggacctccgccgtggcggggcactggtccagcacgcggccgccgtggttgctgaccacgatgccgctggcgccggcctccagcgccttcttcgcgccgttcacggtcatgatgcccttgaggatgaagggcttgccgttcatcagcttcacgatctccttcagctcgtccacagtcttgctgccggcgggtggggtcaggttcttcaggaagggcaggcccgctgcgtcgatgtccatggccacggcaatggggtccgccgcgcccaccagctccgctttctcgcggaccaggtcgatattccagggcttgatggtgggcacgccgcagccgtgattcttcttcagcgcctcggccgccgcctgaatcacggcgggattggtgccgtcgccggtaaaggcggcgatgcccgcgccggcacaggcggacaccagaatgtcgttataggtcagatcgtcgtacttgtcgccgtagtgcagctgcatggcgcccaccggcgcggcaaacacgggcagggccacctgcttgccgaagaaattatagctggtgtccacgggcacgttctcgcagatggtgtccatgttgacgcacagctcctgccacttctgatagttgcggatgaagccggtgccgatccccttggcgccggggccgggcacggtgttcttgcaggccacgccgttgcacacgggacaggacttgcagtagggtcccatacaggtccgcgcgttggctaatatctcctgataggtcatggtatgtatcctccttgtgaaaaactgccgcaggatgtcgaactgcgtcgcattgcgtcgttttttatcgaataccggcgatgaacacgccggggtccttctcacgctgagccttggcccaggccagcatttcgtacacgtccaccgcgccggtgatgaccgcgccgttgtcccacgtctccgcggtgcggccccgcaggaacgcatccggcgtgctggtgcggacgtagtaggggtgcgcctcgccgctggtcaggagcatggacacggccctgtcggtgtaaaagccccgcttgccggacagcaccgtcaggcagtcctgcaccacgttctccgccgtggggaagcgccccgcgccctggccgtagaagctctggcggcccagctgctcggcctcataggtgatgagattgaagttggcgggcaccgccgcctccagatcgccggcgtccaccagcgtgggctccacataggcgcacacgccgttttccgtgctctcggcccgggccagcagcttgcaggcaaagccgtggctctggaaggccgcaatatccgccgccgtcaccgtccggatgccgaaggtggggatggctgtctcctccagcgccgcgtcgaaggcgatgttggcggagatgcacagcttgcggcggatatcgtcgccgtcgatgtcggcggagggatccgcctcggcatagcccaggtcctgggcctccttcagaatagcggggaagtccaccggagccttgtgcatggcgtccatgataaagttggtggtgccgttcataataccgcccacggcgcacaccgtatccagccgcttcacgcgctccaaattcgtcagccagggtatgccgccgcccacggcggcggtgcagcgcagggccgcgcccttctcccgggccagtgccgtcagctccgtgtaataggcggcgatcagtgccttgttggccgtgaccacgttcttgccccgcgccagcgcggcggagacatattcataggccgggtgcagcccgcccatgacctccaccaccgtgtcgatttccgggtcattgaggatgtcatcggcgttgaaggtgaccacctcctccggcaggccctctttgggactgcggagcagcacacgcttcacattcaggtcatcgcgcggcgcgcacagcgcccacacgccgccgcctaccacgccaaagcccagcagaccgatatgcatcatagtcgttacctccttgggtcgtcccgcctgcgcgggcgtcattttggccccattgtacccgccggagcgctgcctgtcaagccggaaaaagcccgcaggcaacggcctgcgggcctttttcatccgataagcttttcgatctccggctgggagacaaaaccgatggacttgttcaccagttggccgttcttgaacaccagcagcatggggatgctctccacgccgtaggccgcggccagggacatattctcgtccacatccaccttggccacggtgacgtccggccggtcagcggccagctgctccagcacggggcccagcatacggcaggggccgcaccagttggcccagaaatccaccagcaccgtgccgctgttttccaggacctgctcccggaagtcgctctcgtttacatggatcaatgccatctccggcacctccttgtcctttgttttatacctttttctccagacacaccagctgcacgttcgggatgccgttaaaggtcccagccacgatgcccgcctcggtgtagcccagctttttgtacagcgcccgggcgggcgtgttgcgggcgttggtgtcgatccgcaggtacggccgatccgtttcccgggccaactgctcatagaaggccacaaaagccgtaccgtaccccttacccttcacagtggggtccaccaccagtgtgtgcagcaccagcacctgctccggcggcgcgtcatgccgccaggtacactggctgtattgcgccatctggttctggtccagcttggcggcggccgcaacacgtcccccgtcctccagcacatacagtgtgccggcagccagcgcgtccagagccgtctgctccgtggggtatacgccccgggtccagccggtggacagctcgccgcgctcctcacgatccagaagcgcctcgtaaatggcggtcacagcggggatatccgccggaaccgcttttcgtaccagcatagtatgtcctccttacctcgtcagtaaccagaccgccagtgccagctgtgccagcagtatggcgggcacgccccagacgaaataccagtgcttcgtcttgtggtgaaacacccgcatacccagcagcgcaccgacactgccgcccaatagcggcagcaggaacagcgtcttttccggcacccgccatttgccctgtctggcccgacgcttgtccgcaccatagatgatgaacgtcgtcaggttgataagcgccagatagataagcagcgccgtaccgccgccggaggcaaacaccgtcacaggcccgtccgcgccgccgacaaagcccagcgacggctggctcatttggccagcttggccagctcgcaggccgtggccgtggcaagcttcgcgttgttatacaccagctgaatgttggcatccaggctgctgccgccggtgatgtccttgatcttggccagcaggaagggcgtggtggccttgccgtggatgccctgctccttggcctcctccaccgcctcgttgatggccttgttgatcacgtcggcgtccatggagtactgctcggggatgggattcgtcaccagcataccgccctccagtcccagctcgcgcttcacatggaaggcctcggccagctgcttgggggtgtccagccggtagtccaccttaaagccggacttgcgggtatagaacgcgggcagctcctcggtctgatagccgatgaccggcacaccgtgcgtctccagatactccagggtcaatcccaggtccaggatggacttggcgccggcgcacaccaccatcaccggggtatgggccagctcttccagatcggcggagatgtccatggtggtctcggctccgcggtgcacgccgccgattccgccggtggcgaacacctggatgccagccatggcggcgatcatcatggtggtggtcacggtggtagcgccgtcgcggccctccgccaccagaatgggcaggtcgcggcggctggccttggtgacgccggcgccggtcttgcccagatagtcgatctcctcgggggtcaatccggccttcagccgaccgccgatgatggcgatggtggcgggcaccgcaccgccgtcacgaatgatcttctccacgttcagtgccgtctccacattctggggatagggcataccgtgggagatgatggtgctctccagcgccacaacgggcttgccggccttcaaagcctcctgcacctcaggggccacgtccagataacggttcataacttgtacctccttatgtcatgcaattctatttacgcttttttgctcatgcctgtattgtccaaaatatagtccacattctcccagctcatgccggggtggatggtctccgccgccgtgcaggccagcgcaccggccccggcggccttccgcgcgcactccgccagtggtttcccgtgggcgatgcacgcggccagcgccgccgccatggcgtccccgccgccggtggcgttcaccacctgcaccttcggacagggcaggcgcacgtgccgccccgcctggtcctcggcgtacaggccatcgctccccagggagatatacacctgctgaacgcccttgtccagcagggcctttgcggccttttgaacgtctgcctcatcgcggatggtcacgccgctgagcagctccgcctccatacggttgggcttcagcgccgtcagcttatccagcaccggcagcagcttcggcgccttgatggtgctgaccggatcggccaggacaggcgcggtgcagtggctgcacagccactggatagacgcctccggcaggttcgtctccaccaccaccagatcggcatggttgatataatccagccgctgccgcaggaactccggcgtgatgtgctcatagatggccatgtcgttcacggccagggccatgtcgccgtcgcagccgtcgataaacagataggtgcccgtccggccgccgggaatggtggcgctgtggctcaggtcaaggccgatatccgccgcgttctcccgcacagactgggcaaagctatcctgccccagtaccgtgatcatggacacctgctcacccagcaggcagaggttgtgggcgatgttccgtcccacgccgcccagagaggtggtcacccggccggggttggagtcccgggccaccagcggcgcgtcagacaccgcgccgatatccatattcacgccgccaaccacggcgatgtagggcgcctcacgcagcagatagccgcggccggcaatgtagcccttccgcatcaggttggaaatgtggaccgcggcgctggaccgcgtaataccggccttgtcggccagctcctgctgggaaatacacgggttttcccgtatccactccagcagctgccgttctcttcgggtcacacagccacctcctaagcaagtgcatttttgtaatcacaagcttattatatcaacagctgtacgtttgtcaagaggcaaatttccgcaaaaaaagcggcgcttctccacgagggaaacgccgtcttctttcagctgcaaaccgttggcatcacagcgtttttggcggtatgccgcgggtgccgtttgtggggtccacaaacaggggaagggcgggcggcgaggacgtgaaaaaaaggaaggcgagggcggcgagcaggtggagcagaatgcccaatatctggaaaggaacggacgagaggcgggcgctcttttgcagggagacactgacaaaatatgccagcagcacggcggcctgaaagatcaggatgttgaccacgcccacgctttttcccaggataccggtgtaggtatagaacagggccgggatggcggcgaggccggtgagcaggccgatggccctgggcaaagcgcttgcggcacaacggtttgcggcgatcgtgacgacggtccacaccagccagggaacggccaaaagcttcatgtgctcccaggtggattcgttgacggcggagagatacgcggcccagccggcctgaccggtccagtcgtagacaaagtgcagcaggttgccgaaaagcagagtaaacagcattcccgccgtctcaagggtacggcgttcccgttcttttctcattgaacattcccctttctttccctttctctttcacatatctatcgtgtacgttttatacacctctacgcggcattatatacacctttggtatatgtttatacgcggtatatgaatgttcgggcggcggagcgcacaattgcgcagacaggggtggaattctgcgggaagtgtgctatactgttccataccatcgattgacaagggcagacacggttttgacgggcagaaatgcgcccatactgcgtcaaaccccttggcaatacggcaagtattacctgcgggccttttcttgtctggacacatttctgctccgacaaaactgctatgcacctgccagcgatgtattttcgagtgatttttggcttttgagatgcaggcgggctgacgcccgccaagacgaaaaggacaaaaagcaccggaaagacacgctgtcaggcgtgtttgctcttgtcaatcgatggtaagaaagggtgagcaccatgaccgttacggaaaagctggccgcgctgcggcagaatatggaggcgcgcggactggcgggctgcatcgtcgtcaccgacgactttcacggctcggagtatgtaggggcgcatttcaaggcccgggagttcctgtccggcttcaccggctcagcgggaacgctggcggtgctgcgggagggcgcatacctgtggacggacgggcgatactttttgcaggcggaacggcagctggagggcagcggcatacagctgatgcgcgccggccagccgggcgtgccgacgctgtcccaattcctggcggagcagctgccggagagcggagccctgggctttgacggccggaccgtcagcacacggctgcaccggacgctggaaaaggcgctggcggacaagcacatccggctggacggcggcttcgacccggcggcgggcgtttggacggaccggcccggtctgtccaccgcgccggtatgggccttcgacagcggggtgacgcggcgggagaagctgacggccctgcggcaggacatggcggcgcagaaggcggaatggctgctgctgaccgatctgatggacgtggcctgggcactggagttgcggggcggcgacgtggcatgcacgccggtattcctgggctttttgctggtgggcacggacagcgccgcgctatatgcccaggcagagagcttcgcgccggagatacgcgccgcgctggcggcggacggcgcagcgctgcggccctacggggatatctacgacgcgctgcgggcgctgccggagggcgcgcgggtgctggcggacagcgccacggccaacagccgcatcgcggaatgtctggcccacacggcgtggacagacacacccagccccgctgcccgccgcaaggcggtgaaggccgggagcgaacagacgggcttccggcaggcgcatttgcaggacggcgcggcgctgtgccgcttcctgtatgagatgaagacacggccggaggcgtacaccgagctgtccgccgcggcgctgctgcgccggtatcggacggaacaggcggattttctggaggacagcttcgagaccatcgccgcctatggcccccacgccgccgttgtccactacgcccccgcaccggagacggacgtgccgctgaaggcgcagggcctgctgctggtggacagcggcggacactacgcccggggcacgacggacgtgacccgtaccatagcgctgggccccatcacggacgaggaacgccggaggtccacacaggtgctgcagggccacatacagctggccatggcacaattcccccagggggtcatgggggaaaatctggacgcactggcccggggcccgctgtggcgggagggcctggactatgaccacggcaccgggcacggcgtggggtgcgtgctcagcgtacacgaggcgccgccctccttccgctggcgcattgcggaggggctggcacacccggcactggagacgggcatggtcatctccgatgagccgggatactacgccgccggacgcttcggcatacggcacgagaacctgctgctggtgcagccggcggaggcggcgggctttctgcgctttgagacgctgacactggcgcccttcgaccgggacgccctggacccggcgctgctgacggcatcggaacgggactggctgaacggctatcacaggcgggtgtatgcacagatcgccccgctggtgccgacggaggtccggcaatggctgcgggaggtcaccgcggcgctgtgacaatggcaaaaaggaagcaccctgacgggtgcttcctttttttcagttttcgtcggtcttttcttttttcagctgctccagctcggcacggagcatacggttctccgcctggagctggtccagcttgcggtgcagcggcgccagctggcgcttcagctccgccgccaccgcgccgcggtagataccgtagcggccggccacggagaccacggtcagcaccgccgccgtaccgccggcgatgaggcccaccttttttacatccagcttacgcagggtatttaccgccgccggcagctttttgcccggcaggggcgccacctcgatctcgatatggggcaattttttcagttccatgcttctatcacaccctcctgtatccgggcggaccgggccgccgcgtatttctgcttctattatacccgacgggccgccgcttggcaagtacggaccgccggggaccgcggcgcatacactggactgcgggcacgacccgcgaaattaaacacaggaggtcctatcatggcaactttcaccaaccaggcaacgctgacctacaacggccagaccaccacctccaacgtgacggtgggcgagctgacggagacgctgaccgccgccaagaccgccgtggtgcccacctacggcaccgacggccgcgtgacgtatatcctctctctggtcaacagcggcaccgcaccgctgacggggctgaccattaccgacgatctgggcggctacaccttcaacgccgggacggtgtatcccctgtcctacaccgccgggtctgtgcggtactatcagaacggcgttctgcaggcggcacccgccgtcaccgccgggccgccgctgacgttcaccggcatcaccgtgccggcgggcggcaatgccgttatcgcctatgaggccgcgcccacggccttcgcgccgccgacggcggagggcaccgtcaccaacagcgcgtccatcaccggcgcggggctggcaaaccccgttaccgccacggagacggtggcgccggaggcggcgccggcactgaccatcaacaagtccctctcccccaccacggtgacggagaacagccgcctgacgtacaccttcaccatccagaacaccggcaacacggcggcggacgccgcggcggccatcgttatcaccgacaccttcgacccgcggctgacggacctgacggtgacgctgaacggcacggcgctgaccgcccccacccagtacacctatgacgcggctaccggcgtattcgccacggtggccggcgtggtcacggtgcccgcggccaccttcacgcaggacgccgccaccggcgcgtacagcaccacccccggcacggcggtgctgaccgtcaccggcacggtgtaagcaagaaaatatcccccggccttcggccgggggatatgtattattcaagtgcgtcgtggctctcgaacacgtcgtggatgctgccgtaacggtcggcgggcttgtccgcctccgccggagatgcgcccttggccatttgcagctcctgccacttctcgcgggtgatgagcagctggcggggcttacttccctcgaaggggcccacatagccgcgctcctccatctggtccaccaggcgggcggcgcgggagtagcccagcttcagacggcgctggagcatggacacggaggcctgacccgtctccagcaccacctctacggcggcggagagcagctcgtcggcatcgtcgccgtcgtcggacacgtcgccggaggggaccttgccgcccttgtcggccttggcgtccaccgcctgctggatcttctcgatcacgtcctggtcgtaatgggcctcgccggcctcgtccttgacgaacttcaccacacggtcgatctcctccggggtgatgaagcagccctgaacacgggtgggcttggtgtcgcccagagggaagtagagcatatcgcccttgcccaccagcttctccgcgccggtggtgtccagaatgatgcgggactccatggagctggccacggcgaaggcgatgcggctggggatattggccttcatcagaccggtgatcacgtccgccgagggacgctgggtggcgatgaccaggtgcataccggcggcacggcccatctgggccacacggcagatggactcctccacctccttggccgccaccagcatcaggtcggccagctcgtcaatgaccaccaccacggtgggcagctttttcacgtcctcgtccgtctcggacagggcgttatagcccgccaggtccttgacgcccttttcagagaacatcttgtagcgcttcatcatctcgaacaccgcccattgcagggcgccggcggcctttttggggtcggtgaccacggggatgagcaggtgcgggataccgttgtagggcgccagctccaccatcttggggtccaccatgataaaacggacctcgtccggcgtggacttgtagagcaggctgacgatgagggagttggtgcagacggatttaccggagccggtggtgccggcgatgagtacatggggcagacgggcgatgttgcccacgatgttgctgccgccgatatccctgcccacggcaaaggccaccggggagggatggtcgatgaactcacgggattcaatgacatcgcggatccgcacggcggtgacggtgcggttggggacctcgatgcccacggcggatatcttgttgggcaccggggcgatgcggacgccgctggcacccagcgccagggcgatatcgtcctggaggttcgtgatcttactgagcttgacgccctggtccagggtgaactcgtagcgggtgacggatgggccatggatgacctcgccggcgcgggcgtccacgccgaaggagcgcagggtgtccgccaggcgcttggagttgttccgcagctcggcgcccacctcggtgtagttgccgccgcggttctgctccagcagggtgatgggcgggtagcggtaggtctcctccccctgggccagctcctgctcgatggcgtcgctgacctcctgggcggcgctctccacctcctgctgcagctgggcttttttctgcttgtcgctgaggggctttttcggggcggggggctccgccggagtggcgggcggtgcaggttcgtcgctgaggggctggggcgcaggggcggggccgccccgcagcacctgatccggcgtgcggatatcgtcactgcggcgggggaagaaggagctggcgggcggaaggaccgtgtcgtcacgctcgctgtccagcgggatgtcgatattggggcgcctgcggcccttggcaggcttttttgccggggcgggagcagcggtgggggtgaaaccctccgggagggcttcgtcatccgcgtcctcgtcgtcacggcgcaggctctcgccatagctgcggacgcgcgccgcggcctcctggggcgtcaggtgcagggcacccaacagggcggccagcagcaccaccacgaacacgatgatggataccaccttgctgaccagggcctcgcagcccacggccagaccgccggagagcacaccgccgcacttgagggcctgtccgtcggcccagagggtcttgacgctgtccaggccgagggtgtaggccgtgcggcacagggccaggtggcacagcacgcccaccagcaggggcagcagcgccacgcaggtggtacgcaggacgacgggccggccccgatggcccagctggatgacggcaatagccgccagcaccggggccgtcaggtaatagccgtagcccagcgcacccttgagcaccctggcgatccacaccaggaggagggcgtccacgttgaaatagctcaccagcacgcacagcgccagcagggcgcagacgatgccgccggccatacgcgccgcggcgttatacgccggcgggggcggcggggcaggcgtttttttgcggctgtttcctttcttttgtgtcgatgccatagtctatctacctcacttgatgccctgcagaacaagggtcagcacgcccgccgcccagcagtagtaggcgaaggcgccgaaacggcccttgtccgcgatatacttcagaagccggatgcacagatagcccgtcacggcggccacggccacacccaccagatacatgggcacctccgcgccgacgatgccggcctgcaccgcgtccttgatggagaggatattggcccccagcacggcggggatgctcagcaggaaggaaaagcgcacggcgaaccgccgctcatagcccacaaagcagccggcggtgatggtcatgccggagcgggagacgccgggcagcgtggccaccgcctgccccacgcccaccagcagggcgtccaaccaggtggcgctgcgctcggtcttgcggccccggcgcacccggtcgcacaggaacagcaggaagccggtgaagatcagcgccgcgcccacgaaatacatattgtcgcccaggccctgcactgtcttgcggatgggcagcaccgcaaacagcggcagcgtaccgacgatgatcagcaggatgagccggcgggcgggcggcaccggtgtgggggtgctgcggtgcgccaggtcgccgatgccccggaagagctccaccaccatgtcgcggatgtcgctccaataggcggcgaacacagcaatgagcgtgcccaggtggagcagcacgtcgaagaactccgggatgctccccgctccctccatattcagcaggttgcgggcgatggccagatggccggagctggagatgggcaggaattccgctatgccctgcaccagtcccaacagaattgctttcagataggtcatgacacacctcacgtcattatacactcccgcaaaacgggaatactgttccaatataggaagagtataccacatcgggcaaaaaaatgccaccacttatttcttacctgtctgtcatcttattgtcaccctgcacaaaggaaaccggttatttttgccattctgcctgttgttgtcccccgtgcttttgtggtatgataaaatacgtatgatcagaggcaggcgaagggagtttcctccgcgaaaaatatacttcaaagggggacggcttccggaaacggggtcttcccctgtctgtttcgtatcaagagaaaggcggtgagtaaactgtaccgtgaaaaaatagaccagctgcaggctgcggagcagcggcttctggagcagaaggccgaggcccagcgcgccgcccgggcactggccgagcaggcccgccgggacggcgacggtttggtgcgcgaggcgcagaacgccgtgaaggtgctggagaacgaagccatgcagcgggccggtgaagccggacaggcggcggatgccgccctgcgaagcgacgccgagcgcacctgcacagccatacggcagcaggcggagcagcgcatggacacggctgtccgcgccatcgtggaaaaggtggtgaagcggtaaatgcccattgtaaaaatgaagcgcctgcaggtgctggcgctggcgcgggaccacgacgcgctgctgcggcagctggagcgtatgggctgcgtggagatcagtgagccggacgcgccggatgcgccggagagcctgcggcgctgcgacagcgagacggcggactgcctggcccgccagcggcaggtacagacggcgatcgatgccctgcggcgggctgcgccgcccaagaaagcgccgctgctggcgccccgccccgccatcggcgaggcggaatacctgagcgagacggggctggccgacgggctggcgctggcccgccaggtcaacgaggcaacgggacaattacagcagctgacggcgctggccgcccagctggagaccgaccggatcaccctggggccctggctgagtctggacctgcccctggagctgacggagacacgctgctgcgacgtgaccctgggcgtactgccgcccttcgtcccctgggacgaactgtgtgggcaggtacaaaacgaatatccggagagcgagctgtatctgctctccgccgaccggcagcagcagtgcgtactgctcatcacccacaaggcggcgacggcacaggtgctggagctgctgcggggccggggcttcgcggcctcacccctgaagggccgcaccggcacgccggaggaaaaccggcggcgggacacagaccggctggcagaggtcaagcggcagcaggagaccctgcgaaagcagctggatgagctggcggaacggctgccggagctgtatctgtgcgccgaccggctggcctcccgcctgcagcgggaggaaaaccgccgcagactgctgaccgacgggtgcatcgtggcgttcgacggctgggtgccggagaaaaagacggcaaggctgacggcgtatctggacacggcggactgcgactacaccctgtccgatcccacgacggagcagataccggaggtgccggtgctgctggaggacaacgcggtggcgcggtccatgaactgcatcaccgagcagtactccctgccggcctacgacggcgtggaccccaacccggtgatggcaccgttcttcatcctgtttttcggcatgatgatggcggacatcggctacgggctgctgatgctcctcggctcatggctgttcctgaagaaaaaacggccggacgaccgcagctttatggagatgatcttctggtgcggcgtgaccaccgtggccttcggcgccatgaccggcagcttcttcggcgacttcctgccgcagctcttcaagttctttgacccggagagcacctttgccctgccggcgctgttctcacccctggacgacaccatggccatcatggtgggctcgctgatcctgggcgccttgcaggtgttcaccggcatgaccgtcagcgtggtggaaaaatgcaaaaagggctgctttatggatgccctgtttgacgagatcacctggtggatcattctggcgggcacgggtcttgcggtgcttggcatcggcagtgtatccggcgtgccggtggtgctgatcgcgggcgttcttatgctggtatacggcgcgggccggggcaaaaagggcttcggcaaggtgacgggcttcgtggcggcggtgtacaacggcgtgacgggtttcttcagtgatatcctgtcctacgtccggctgatggcgctgatgctgtccggcgcagtgctggcccaggtgttcaatatgctgggcgccaccaccggcaacgtggtcaccttcatcatcatcgcattcgtcggcaatatgctgaacctggcgctgaacctgctgggctgctacgtccacgatatgcgcctgcaatttctggaatttttcggacgcttctacaaggacggcggcaaggcctaccgtcccctgcgcgtccgggccaaacacgtagagatcattaaggaggatactaaatcatgttagcttttcttgaatctgtgggcggactgggtttcgccatcctgggcgcggcgctgaccgccggcctgtgctgcatcggctccgccaagggcaccggtatggtgggtgaggccgccgccggattgaccagcgaggatcccgataagtccaccaagtgcctgatcctgcaggtactgcccggcacccagggcctgtacggctttgtggcgctgttcctggtgctgggccagaccggcctgctcagcggcagcgtgctggatctctccctgacccaggggctgtccttcttcgccgcctgcctgcccatcatgctgggcggctggctgagcgccatcttccagggccgcgtggccgccgcgtccatcaacatcgtggccaagcacccggaggccgctaccaagggcatcatctactgcggcatcgtggagttctacgccatcctgtctctggtggcgaccattatgatctccctgaacatcatgaagtaaggcgggtgcgcctatgaacggtatcgacaagatcatcgcacgcatggaggccgacacacaggccgagtgcgccgacatcgccgcccaggcggcggcggaggccgaggccattctggcccagtaccgcgccgatgcggacaagctgctccgcgagggcgaggcccgctgcaaggtgctggagcacgagcaggtggagcgcctggagggcggcagccgtctggcctgccgccagcgggtgctggcggagaagcagcggatgctggacgaggccttcgcccgcgccgccgacgcgctgctgaagctgccgcgcccggagtatatcgacctgctggcatcgctggccgcggaaaacgggcagggcggcgaagcgctggtgttctccgccgccgaccgggacacggtgggtcaggcggtggtggacgccgccaacggcaaaaagcccggcgcgggcttcaccctggctgccgacacccgggagacgggcggcggcgtggtactgcagcggggccgcatggagatcaactgcggctttgccgagctgctgcgccgggcacggcaggaggactcctccgccgtggccgccgtgctgtttgactgaaagggggcgtccctttgacaaaacggagaaaggacacggactatctgttcctgtccgcccgcatacgcgccatggagcgccggctgctgacggcacagcggctggagcagctgctgacggcaccctccgtcgaggcgtgcgcccagctgctgagcgagtggggctacgcgcccgtacacgatgagccgtccctgcaggcggcgctgagcgcgcagcgcgaggcggtgttcgccgacgtttcccgctttatgccggaggcggaggtgctggacgtgttccggctgaaatacgactaccacaacatcaaaacgctgctgaaagcaccgcaggatgcggagcgtctgctgatcgacgccgggaccgtaccggcagagacgatgcggaaaaagcacgctgaaaacggcggctgggactttctgcccgccgacatggctgccgcggccgatgaggcccagcgggtgctggccgagacgggcagcgcccgcagcagtgactgcatcctggatcgggcctacttcgcgcggctggaaaagctggcggcggacagccacataccctatttgcaggactatgtccgcgccatgatcgacgcggcgaacctgcgctcactcatccgcacccagcggctggggctggacgccggcttcctgcgggaggtgctgttccccggcggcagcgtgacgccggaggcgatccgcgccggaagcggcagcggcgctgccgcgctgtggcggggcacggctttcgcccgggaggcggagctgggagacgaggccgccaagggcggcagcctgaccgcctttgaaaaggcctgcgacgacgcggtgctccgcgccgccggcgcggcacgccgggtacccttcggcgtagaggtggcgctgggctatctggcagcaaaggaagcggagtggacggcggtgcgtaccgtgctgtccggccggatggccggtgtgccggcggaggcgctccgggaaaggctgcgtgagcaatatgtataagatcgccgttattggggaccgggacagcgtgctgggcttccgtgcgctggggctggacgtgttccccaccgaggataccgacacggggcgcagaacgctgcaccgcctggcgcaggaggactacgccgtcatctatatcaccgagcagctggcgcagcagctgaccgccgagatcgcccggtataaagacgcacccctgcccgccgttatactcatccccggcaagaccggttcgctgggcatcgccggggccgccctgcacgacgcggtggaacgcgccgtgggcgcggacatttcctgaaaggagcaagagaatgggtaagatcatcaaagtctccggcccgctggtggtggcggacggcatggcggacgccaacatggcggacgtggtgcgcgtaggtccccagcagctgatcggagagatcctgaatatgaccggcgaccgggcctccatacaggtgtatgaggagacgtccggtctgggccccggcgccgatgtggtcaccaccggcgcacctctgagcgtagagctgggccccggcctgatcgagaatatctatgacggcatccagcgtccgctggaggagatcgtccgccgggtgggcagcaacatcacccgcggcattcaggtgccgccgctggaccgcgacaggctgtggaactttacccccaccgccgctgtgggcgacaccgtggctgtgggcgacattctgggcaccgtgccggagacggagtccgtgctgcacaagatcatggttcccaagggcgccgagggcacggtggcgtggctggccgaggccggacagtataacatcacccagcccatcgcccgggtgaagctggccaacggtgaggtgcgtgagctgaccatggtgcagaagtggcccgtccgcgtgggccgcccctataaaaagaaattcccgccggtaaagcctttgcagtccggccagcgtgtcatcgacaccatgttccccatcgccaagggcggcaccgccgccgtgcccgggcccttcggctccggcaagaccgtggtgcagcaccagctggccaagtgggccgacgtggacatcgtggtctatatcggctgcggcgagcgcggcaacgagatgaccgacgtactgcgggagtttccggagctgaccgacccccgcaccggcgagagcctgatgaagcgtacggtgctgatcgccaacacctcggatatgcctgtggccgcccgtgaggcatcggtctacaccggcatcaccatcgcggagtatttccgcgacatgggctacgatgtggccgtcatcgccgactctacctcccgctgggccgaggccctgcgcgagatgtccggccggttggaggagatgcccggcgaggagggatatcccgcctatctggcctcccgtctggcgcagttctatgagcgcgccggcgtggtgcagtgcctggccagcgacgagcgcaccggctccctgaccgccgtgggcgcggtgtcgcctcccggcggcgacctgagtgagccggtggcacaggccaccatgcgtatcgtcaaggtcttctggtcgctggacgcctcgctggcctatcgccgccacttcccggccatcaactggctgaactcctactccctgtatctggacgcggtgacgccctggttcaacgagaacatgggcgaggacttcatccggaaccgcaaccgcgccatgcaccttttgcaggaggagaatgagctgaacgagatcgtccagctggtgggcaaggattccctgtccgccaacgaccagctgacgttggagatcgcccggatgctgcgggaggacttcctgcagcagaatgcctttatggacgtggactcctactccagctttgaccggcagatgcagctgctgaggctgatcctgcactacgagtccctgtgccgcggcgctgtggacaaggccgtggccccatccgcgctgtacgccatccccgcccgggagaagctgggctgggccaagtacgccgccgcagaggaatacgccgccaactacgccgccgtccgcgctgatatggagcgcgagatcgccgagctgatccgaaaggctggtgaagaggaatgatgaaggaataccgtaccatccacgaggtgtccggtcccctgatggtggtggaccatgtggagggcgtcacctatgacgagctggcggagatccagctgcacagcggcgaggtccgccgctgcaaggtgctggaggtcaacggcgaccgcgccgtggtccagctgttcgactcctccgccggcatcaacctgcgggatgccaccatccgcttcctgggccaccccttgcagctgggcgtatccgccgatatgctggggcgcgtgttcaacggcatgggcgagcccatcgacggcggccccgccctgctggcggaggaataccgggacatcaacggcctgcccatgaacccggcggcccgtgactatcccaacgagttcattcagaccggcatcagcaccatcgacggactgaacacgctggtccgcggccagaagctgcccatcttctcctgctccggtctgccccacgccaatctggcggcgcagatcgcccgacaggccagggtgctggacgacagctccaacttcgccgtggtgttcgccgctatcggcatcacctttgaggaatcggagttctttgtgcgggagttccagcgcaccggcgccatcgagcgcacggtgctgttcaccaacctggccaacgaccccgccgtggagcgtatcgccacaccccgtatggcgctgaccgccgcggagtatctggcctttgagaaggatatgcacgtgctggtgatcctgacggatatcaccaactacgccgaggcgctgcgtgaggtctccgccgccaagaaggaggtccccggacgccgcggctatcccggctatctgtacaccgacctggccagtatgtacgagcgcgccggccgcaagctggggtgcaagggctccatcaccatgatccccatcctgaccatgccggaggacgacaagacccaccccatccccgacctgaccggctacatcaccgaggggcagatcattctgagccgcgacctgtaccgcaagaacatcctgccgccggtggacgtgctgccctctctgtcccgtctgaaggacaagggcgtgggcgccggcaagacccgggaggatcacgcgcccaccatgaaccagctgttcgccgcctacgccagcggtaaggaggccaaggagctgatgaccattctgggcgaggctgccctgagtcccacggacctgctgtacgccaagttcgccgacgagttcgagaagcgctacgtctcgcaggggttcgacgagaaccgcactatagagcagacactggacctgggctgggagctgctgcgtatgctgccccgcagtgagctgaagcgcatcaagccggagatgctgaacaagtatctgccggtgaaggagtgagcgccatggcgggaaagactgtcaatcccacccggatggagctgacccggctgaagggccggctgaagaccgcacgccggggccacaagctgctgaaggacaagcgggacgagctgatgaagcagtttatggacgtggtgcggcgcaaccgcgcgctccgcgccaaggtggagcaggggctgaaggaggccaacgccgccttcaccgtggccgccgccctgatgggaccggaggtgctggaggaggccctgtcctgcccgcggcgcagcgtgtcgctggaggtatccactcggaatgttatgagcgtcaacgtgccggtgttcaccttccagaccgacagcggcgacgacgcgctgctgccctacggcttcgcccagaccagcggcgagctggacgcggcgctggagaagatgcaggcggtattcgccgatatgctggagctggcgcaggtggaaaagaccatgcagctgctggcccaggatatcgaaaagacccgccggcgggtcaacgcgctggagtatgtgatgatcccggagacggagcagaacatccgctatatcaccatgaagctggacgagaacgagcgcggcaacaccacacggctgatgaaggtcaaggagatggtattgcaggacgcgcaccactaccagccgtaatgaatcaaaacctccggctaagccggaggttttgatttttgcttattgctcgttccactgtgccagggcgctgcgggcggcggactgctccgcctccttcttactgcggccggtgccctggccaagctctctgccgttcagcgtcacccggaaggtgaactgcttagcatggtcggggccggaggtccccgtcagctcatagtgcagcacctggccgcttctgcgctggaccagctcctgcagctccgtcttatagtcccggcggcgctcctccaccacctcctcacgctccttgtccagcaggacgcggtggatgaggtcactggcggcgtccatcccgccgtccagatacacggcggcaaataccgactcggtggcgtcggccagtatggagggccggcagcggccgccgccctgctcctcgcccttgcccagcagcaggtgactgcccaggtccagggactgggccacctcgtgcaggctctcctcacacaccagggcggcgcggatgcgggtcaggtcgccctccggcagctccgggtgcttcttgaacaggtgctcggcggacacaaagcccaacacggcgtcgcccaggaattccaagcgctcgttgctgcgtatgccctcgctgcggtgctcgttggcgtaggaactgtggtacagggcggcacggagcagctccgggtcgcggaaggtgtagcccagctttctttccagttcttccataggaacctcctgaaaaaatacggccctgccgggccgtattttctgtcgttatagtcggatcagcccagcttgctgttgagatagcggacgcagtcgccgacggtcttgaggccggccaggtcttcttcgtcgatctcgccgatgtcaaactcctcttccatcgccatgaccaattccaccagatccacagaatcggcacccaggtcgtccacgaaagagctgtccatgctgatctcgtcggcatcgatagcgaactgctcggcgatcagatcctgcatcgtcttgaagatctcttccatagtcaagggtattcctccttctttgcttgttatctccgaaaataatacggcaatcgtgtgacagtgtcaatacctttttggtaaatttatacggtgggaagctgcattttgtctatgtgcgccgcgatggccccggtaataccgctttcggccacctgaatggcctgccccaccgcgttctcgatggcctcggcgttggagccgccgtgggccttgatgaccggcctggagatgccgataaaggccgtgccgcccaccttgttggggtccagccgcgctttaaaggcgttcagccccggcatgaccagcagggcggcaagcttcgtcagcaggttctttttgaacatccccttcagggcgctgcctgcgaaggagcccacgccctcaatggacttgagcatcacgttgccggaaaagccgtcggtaacgatcacgtcacagccgcccttgatggcgtccttggcctcgatattgccgatgaagtgcagatcgccccgggcgtccgccgcgcgcagcagcgccagggcctgcttttgcaggtcggtgcccttgctgtcctccgcgccgatattcagcaggcccacgcggggcgtcgccacccccagcacccgctgggcatagaaattgcccagataggcgaactggagcagatactccggggtacactcggcgttggcgccgcagtcgataagcacggcgctgccggtggtggtggggatgaccggcgccatagccgcacggcggatgccatggatacgcttggtgatcagcgtcgcaccggtcagcagcgcaccggtggagccggcggacaccacggcgtcgccctctccatcgcgcagcatggtcaacgccgcgcccatggaggtatccttcttccggcggaacaccgtggcagggtcgtcgcacatatccaccgtctccgtggtggggcggagggtcacaccctgcggcagcgttgccgcgccgcaccgggccgccgcggcccggatggccgcctcgtctccggcgaggacgatgtcacagccaaagcggctgtgggcgctgagcgcacccctgacgatctccagcggggcgttgtcgccgcccatggcgtcgatgatgatcttcacagagagagcacctcctctttgatggtatccagaatggccagcgaccgctggctcagctcggcatttttgttgcgcttacccttgacccggtggtccagcggcgggataatgccgaagttcacgttcatgggctgaaagtccgccacgctctcgttactgacatacaggcccagggcgccgatggccgtctctcggggaaggtcgaggggcgcctgtcccttcagccgccgggccaactctatacccgccagaaaaccgctggcgcaggactccacatagccctccacgccggtcatctgaccggcgaaggcgatacggggatcgcttttcagccggtagtagcggtccagcagccggggcgagtccagataggtgttgcggtgcatgacgccgtagcgcaggtactgggcgtcgtgcagggcggggatcatggagaacacccgcttctgctcgccccatttcaggtgggtctgaaagcccaccagattgtagatggtgccgtcagcgttgtcacgccgcagctgcaccacggcgtagggctcacggccggtcttagggtccaccaggccccggggcttcagagggccgaagcgcagggtgtcctcgccccggcgggccatgacctccaccggcatacagccctcgaacacgccgctgtcctcaaagccgtggacctcggcctcctccgccttcaccaactccacccagaaggcctgatattcctctttggtcatggggcagttgatgtagtccggggtgcccttatcgtagcgggaggcgaaatacgcgctgtccatgtccacgctgtcgaaggtcaccagcggggccgccgcgtcaaagaagttcagcgtatggccgccgcccagcttttccgcaatggcatccgccagcgcgtcagaggtcagcgggccgctggcgatgaccacattcccctccggtatagcggtcacctcgccggggaccatggtgatattggggtggcccagcacggactcggtgaccatgcgggcaaagccctcgcggtccaccgccagcgcgccgccggcgggcaccgccgtggcgtccgcgcagcggaggatcagactgtccagccgccgcagttcctccttcagcaggcccacggcgttctccagccccgcgccccgcagggaattggagcagcacagctccgcaaaatagccggtcacatgggcgggggtcttcttctccggcttcatctcccgcagcaccacggggatgccccgctgggccagctgccaggcacattcggacccggccaggcccgcgccgatcacagttacgctttccatttattcttccgctttcttggtcgtagtcttttttgtggtcgtcttcttggccgcggcaggcttcttggccgctgtggtcttcttggcagcagcctgcttcttggccgccgtggtctttttcgcagcggactttttcgtctcgggctgcgccgcaggcttttcctccgcggccggcgcactgtcctcggcagacgccgcggcgtcatcggtcttgcggcggcgatagccgcgcttgtcctccggcaggaagttcgggcactcgggattggcgcagaagggcttgttgaagcccttgccggccttcttgaacatggtcttgccgcacacagggcagtcgtcctttaccggcacgtcccaggtcataaaatcgcaggtagggaacttatcgcagccgtagtaggtgtagccgttgcggctggtctttttcaggatgcgtccgccgcacttggggcagcggccgggcatttccaccaccagaggcttggtgaacttacactccgggtagccggggcaggccaggaaccggccgaaccgaccggacttgaccaccatgttgcggccgcacaggtcgcacttctcctcggtcacctcatcagggaccttcaggtacacgccctccatgtccttctcgaccttttccaggttctcatggaacggcacgtagaactggcggatcaggtccttccacttgacctggccggcctccacatcgtccagcttctgctccatacgggcggtgaactttacatccacgatgtccgggaaccgctggcacatcaggtcgttgaccacgccgcccaacggtgtcaggcgcaggtacttgccctccttgatgacgtactcgcggtccagaatagtggacacggtgggcgcataggtggaggggcggccgatgccgttctcctccatggtgcggataagggtggcatcggtatagcgggccgggggctgggtgaaatgctgcaggggcgcaaagcccaccgccgtcacctgctcgccctcctccagcggcggcaggggagagtccttctcctccttgtcgtcgtcccggctctcctcatatacagcggtatagccggcgaatttcaggttgctggcggagcaccgcagggcatgggcaccggcggcgatctccacggagatgctgtcatacacggcgttggccatctggctggccaggaagcggctccagatcagtcggtagaggcggtactgctccggcgtcaggtcgcccttcacctgctccggcgtcagcgccgggtcggagggacggatggcctcgtgggcgtcctgggccccggccttggtcttgtacttccggggtacggcagggcaatacgccgcgccgtagcgggactgtatcagctcgcgggcctgggcctgagcctcgtcggagatacgcagcgagtcggtacgcatataggtgatcagacccacggtgccctcgccggtgatgtccacgccctcatacagctgctgggcaatggccatggtccgacggggcgtcatattcagcttgcgggaggcctcctgctgtaagctggaggtggtaaagggcggcgtggggctgcgctgcttgtcggtacgcttcacggtcttgaccgcgaaggcctcttttttcagctcctccacgatgcgctgggtatccgcctcgtccttaggctcgtatttcttgccgtccacaccgtagtagtgggcggtaaaggacgcggcggcgtggttttgcaggtgtacgtccaacgtccagtactcctggggcacgaaggccgcgatctcctgctcacgctgggccaccagccggatcgccaccgactgcacacggccggcggacaggccgcggcggatcttcttccacagcagaggggagagctgatagcccacgatgcggtccagcacacggcgggcctgctgggcgtccaccaggtcctggtcgatggcgcgggggtgctggatggactcctgcaccaccttcttggtgatctcgttgaacgtcacgcgccgggccttgtcatccggcaggtccagcaggtgctgcagatgccagctgatggcctcgccctcgcggtccgggtcggtggccaggtacacggtcttgctcttgtccgccgtggtcttcaggtccttgatgatatcctctttgcccttgatgggccggtagttgggggtaaagtcaccctccacgtccacgcccagggtgctcttgggcaggtcacgcaggtgacccatgctggccttgaccacatagtccggccccagatatttgccgatggtcttggccttggccggggactccacgatgaccaggttcttctttgctgccatattgttacttactcctttttgagttccaccgtccgcaggaagctccgcgctccctgacggcagacgtagccgtcgatctccagcaccgtcagcgccgacagcacacggcgcaccggcagttcggccagcagtgccgcgtcatcggtaagggtgggtatatccgcttgcagaacggacagcaccgcgatctgatcgtcggtgagtccggcggtgtcctgtgaaatatccagcaccggcagtaccggcgtggtgggcgcgggcgtctcctgcaccggaacggcaggcgcgccgctctccggctccgcgcccttgggcagaggcgggatcgtggcccgcagaggccgcagcttatgggggaagcggctctcataaaagctcagcacgtcccaggcctcgcacaccaggcccgcgccctcgcgtatcagcgcgttgcagccccggctcttgggcgcgtcgaaggggcccggcacggcaaagacctcgcggccctgctccagtgccgtggcggcggtgatgagcgcgccgcttttctcaggggcctccaccaccacggtggcaagactcagcgcactgagcaatcggttccgcaccgggaagtggtcgcccctgggctccgtcccgggcgggtactccgacaggatgacgccggtggcggcgatgtcctcatacagccggcggttggccgccggatacaccacgtccgcgccgccgcccagcaccgcggcggtaaagccgccggcgcgcagggcgcccttcagcgcctcgccgtcgatgcccttggccatgccggacaccagcagcgccccctgtctggccagctcatagcccagctgtgatgccgcacgcacaccgtagggcgtgcagtcccgggtgcccaccaccgtgacggccacctcatcatcgaacaggggaaggctgcccttgccatacagcagcaggggcgggtcgtagatgttccgcagccgcgcggggtatcccgcgtcgtccatggtcagcaggaactggccgtctctggcgcagtcctccagcaccttctccgcccggtccagcgatttgtccgccaacagggcggcctgtagtttcgtaatgccctctgccagcagcagctcgccctccggggcaaaatagatctcctccggcgagccgaaatgcgccagcagctgcaatttcgcccgttcccccagacccggcagtgtggtcagccacacccaatacttcaaagccgccatctcagttcccctcctccgcgcgataggcctcccacagcagcaccgccgccgcggccgcggcgttcagcgactcacagtggggcgacatggggatacgcagcgtctcgcggcacagcgccagcacctccgcgctgacgccccggccttcgctgccaatgaccagcgcgcagcggcgcagatcccgctgccgcacgtccaccgtgtcgtggcgcagggccgtgccgtacagcggcagccctgcgtctgccaacaagcccggcagggcctccagccccaccgcgtacagcggcaggcggaacaccgcgcccatggcggcgcgcagcgtctttggcccatagggatcggcgcagcccggcagcagcagcgcaccagtgcagccgaaggcgtccgccgtccgcagcaccgcccccacgttgcccgggtcctgcacaccgtccagcaccacatagcggcccggcgacaggcgcgcaggcgccgccatatccggcagggcacacagggccagcattccctggggcgtgggcatgggcgaaatagacgccatcacgtccgccggcaccgtcacccgccgcacattctccggcagtccctccgggaaggccacaccatccgcggcgatgacacactgcacggacacgccgtgctgcaccgcctcgcccaccagcttggggctgtcgcacaaaaacaccccggccttccgccggagcgccgccgtatccagcctgcggacctgttccagcagcggattgcgccggctggtaatgcgctctgtcataacggtgcccctcccctctcagaatattccttataatataggtatcctctgcgaatgtcaacaaaaaataagggaacgcggtacggcgttcccttattgcgtactcaaaccgcgtgtccctgcgcccggatgatctccgccacctgtgccacacactcccggcagatagcatcctccggcgcctccaccattacgcggagcaccggctccgtaccggattcacgcaccagaatacggcccgtatcgcccagacggcgggccacgtcgtccacagccttctgcacggccgggtcctgacgggcggcagccttgtcgtgcacccgcacattctccagcacctggggatagatggtcagtccctcggtgagcttgctcatgggctgcttgcgctccagcatgacttccatcagcttcaggctggtcaaaatgccgtcgccggtggaggcgtacttggagaagatgatatgccccgactgctcgccgcccagggcgcagccgtttttgctcatatactcgtatacgtacttgtcgcccacagcggttttggcatagcggatccccagccggtcaaaggcccggtacagtccgaagttggacatgaccgtggtcaccactgtgttgtggggcagctcgcccagctccttcatatggcggccgcagatatacaggatatggtcaccggtgatgatctggcccttttcgtccaccgccaggcaccgatccgcgtcgccgtcgtaggcaaagcccacgtccaggcctttctccaccacgaagcgctgcagggcctcgatatgagtggagcccacgccgttgttgatattgaagccgtctggctcatcgcccatgacgtaggtcgtggcacccagtgcgtcaaaaacgcttctggcgatcatccaggcgctgccattggcacagtccagccccacctttttccccttgaaggagaacatccccagggagatgaggtagcccacgtagcggttacgccccgcggaccagtccaccgtgcggccgatatggtcccgctgcgccaggggaagcgtctcccaggtctggccgaacacgctgagcttcccgtccaggtagtcctcgatcagggcgatggtgtcctcgtccattttctcgccggaccgcccgatcagcttgatgccgttgtcatagaacggattgtggctggcggagatcataatgccgcagtcgaagccctccgtccgcgccacataggacacagagggcgtggtggtcacgtgcagcagataggcgtccgcgccggaggccaccagtccggaggccagggcatactcaaacatatagctgctgcggcgggtatccttaccgatgaccacctttgccggctcgctgtcgccgccgcggcgcttgcattcaccgcagtaccagcccaaaaagcggcccacctgataggcgtggtccgccgtcagggtcacattggcctcgccccggaagccgtccgtgccgaaatatttacccatttttcttcctccctgtcagcgctgggcggcaatgtcgccgctgcgcttgtagatgctcgccgccggcacggtgccccgcaccgaggacagcggatatacccggctgccccgtccgatgacgctgccggggttcagcacactgttgcagcccacctccacgccgtcgcccaacatggcgcccaccttcttgcgtccggtgtcgatgcgctccgcgccgtccgtgaccaccacatgggtcttatcggacttcacattggaggtgatggaaccggcgcccatgtgggatttgtagcccagaatgctgtcgcccacatagttgtagtggggcgtctgcacgttgtcgaacaggatgacattcttcagctccacggagttgcccaccacgcaatgggcgcccaccagcgcgctgccccggataaaggcgcagtggcgcacctccgcctccgggccgatgatgcacggcccggtgatggacgccgtgggcgcgacgtgcgccgtccggtgcacccacacctccgggccaaagggcagatattcgctatccagctgtgcacccagcgcacggatgcagtccgccaggtcggagagcgcctcccagggataggtaaagcgggccaggtagtcccccgccagtgtatgtgtcagatcataaaggtcgttgatggtgtacatagtctcctccttcgcgcctgtgctactgtacgcaccgcgacgggatgttatgtgctaagtatactatccggtgcggcatttggcaagtgggggacagaaaaaacacccccacgccgcttttggcgcaggggcgttttcagccatttcagttgtccagcggcttcattgtggggaacaggatcacgtcgcggatggagtcggtgccgcagagcatcatggcgcagcggtcgatgccgaagcccaggccgccggtgggcggcataccgtactccagcgccatgacgaagtcctcgtccatcatgtcggcctcctcgtcgccgttggcgcgcttagcggcctgcgccttgaagcgctcgtactggtcgatggggtcgttcagctcggagaaggcgttgcccatctcgcagccgcagatgaacatctcgtaccgctcggtgagggcgggctgctcggggctgcgcttggccagcgggctgacctccacggggtacatggtgataaaggtaggctggatcagcgtctcctccaccttctggtcaaaggtctcatacagggcgttgccccaggtatgggccacgccgtccatgtccacgcccacgctcttggccagctccacgcccttgtcggcatcgccgatgcaggccatgaagtccgcgccggtgacgttcttcaccgcgtcggccatggtgacgcgctgccaggagggggtcaggtcgatgtcgtgacccagccactgcacatggtaggtacccaggatctccttggcggcaccggtgaggatgccctccaggatatccatcatgccgtccaggttcgtgtacgcctggtacagctcacaggtagtgaactcggggttgtgcttggtgtccatgccctcgttgcggaagatacggcccacctcgtacacacgctccaggccgcccacgatcagccgcttcaggtgcagctcggtggcgatacgcatatacatatcgatatcctgcgcgttgtggtgggtgataaagggccgggcgttggcgccgccggcgatggggctgaggacgggcgtctccacctccataaagcccagaccgtccagatagcggcgcaggaacgccacgaactggctgcggatctcgaaattccgcttgctctccgggttcatgatcagatccacataccgctggcggtagcggatctccttgtcggtcaggccgtggaacttttccggcaggggccgcagggacttgctcagcagcgtgatgtcgtgtgcacggacggacatctcgccccgctgggtgcggaacacctcgcccttgacgcccacgatgtcgccgatatcgtacttcttaaagtggttatagttgtcctcgtccatctcgtccttacgggcgtagatctggatacggccggtcttgtcctgcaggtcgcagaaagacaccttgcccataccgcgcttgctcatcaggcggcctgccacggacacagcctgcccctccatggcgtcaaagttatccttgatatcctgtgtgtggtgggtcacatcaaacctggtgatggtaaagggatcgcgtccctcgtcctgcagcaccttcagcttgtcgcggcggatgcgcagcagctcgcccatgtcctgggcctggggctgttcgttcacgttgcggttggtctcgtctgccataatgcagcctccttcgtctatccgtaccgccgttgccggcggtatttatctttcaatactgtcgatacggtagtggatcacgcccttgggcgcctccacggtcacttcatcgcccgccttgcggcccatcagcgccttgccaaagggtgagtcctcgctgatggcgcggctcatcacgtcggcctcctgagagccgacgatcttataggcgggcagctgctttcgcatatccagattggtaacggtgacggtacagccgatggatatcttgtcggagtccatctcggactcatccacgatcacggcatggagcagaatgtcctccagctcggcaatgcgggagtagagcttgccctgctcgtttttcgcctcgtcatattcgctgttctcgctgaggtcgccaaagccgcgggcctccttgatcagctccgccacctcgtcggcacgggtggtcttgctgtaatccagttcctgtttcagctcgtcataccgagcctggctcattttgaattcctttgccatgctgcacacttccctttctatccataaggatacccttttagggctataaacaatatgtcacgttgcattatagtgactttccgtgcgtatgtcaagcaagtctgtgatatgaatgtcggatatctgccattttccggccgccgtcagcaccgcggccagaggctccgtcaccggcaccgccagcgccgccgcccggggcgatgtccataccggcgtctgccgcgccccgcagtcctccgtcagatatatcgccgggccctccgtatcttcccgtacatcgccgcacaccaccgtcagcgccgcccgccggcccccgtctccggcggcgatcccccagcggtacagcagctccgccgccagcgccgcagggtcctccatgtccagctgcacataccgcgcccgccgggccagcaccgtcagcgccgcccgggccgtctcctctccgccggggccgcagcgcagcaccgcggcggcgttttgcagaccgccggggcagagaatatccagcagactgcccagcagggcgaggcgcagcggcagaacggggtatgatgttatgtctgcctgcttcgccagcgaaaggaggtaaacatcggcgcagatacagcggcggacaccggagtcatacatctgacgcaggcagcgcagcgcgcggcggcgggcgaaatagtccctccccacagaaagataatggagtggcagaccctccaccgttatgcgggaaagcactgtcttttggccctgcgtcatgtaaacgatcatgcggtttcccttctcccccggcggtatgcaaaaaaaatgctgttccattctatggaacagcattttcaatatgtcattatttaccaggctttgatgtagcccgccagatagttcagcgggttctggtacacgatcttgctcacaccgttgaccacggtggtggtgcggacctcataatgcagatgcgggccggtggaggcgccggtgttgccggtgacgccgatcacggtaccctgcgagacagtctggccctgtgacaccttcaccacgctcaaatgggcgtacagggtggtcaggccgccgccgtggtcaatgaccacatagttgccgtaaccgccgccccaaccgctggtattggtgaggatcaccttaccgctcttgacggcatatacgctgctggtataggacacgttgcagatatccacacccttgtggttggtgctgccgaaaccgccgggggccacgcgggagccgacgggcgagctgatctttttactggtgctgacgggccagataaagccctcgttgctgggcaccacgtcggagtcggcgatcagctgctcgagctgcgcgtcgatctcatcagccgcctttgcctccgcgtcatgcagctgctccaacgctttctggtcggcggcatactcgttcatcagcttggtggtctcgtccagcttgccctgcagctcgtcctgctgctcactcagctgggtctccttggcctccatctccaccttctcggccttgatgttctcccgcgtctcctgcagggcggagataattctcttgttgtactccgccacctcgttgacgaactccatgcggttcagcaggtcggccatgctggtggccttgaacagcaccgacagatagctcaggctgcctcgctcctcctcctcacggacctgctggcagaacagtgtgtactgctcctcctccagcagctcataccgggcgatctgcgccgcggcgtcgtcgatctggttctgggtatcgtcgatctgctccagcagcagctggttccgctggtccagcaaattcttggtggccatcacgtcgttcttcttggccttggcctcagcgatctgcttctccagttccttcagcttttcctgctgctccttctttttctgttccaatgcggccacctgtgccgccttgcgctgctcctcctccagctcagcctcggtcttggtcgcataagccggtcggacggacacggcggcggccgcacccagcagcatcagcagtgccagcacggcgcacagaatacgtttcggtttcttcatgcaagcgctcctttctttacacccggaggaaccggcgtatggcggtcaggctgccgcccacacccaccagaatacccgtgcccaggaacaccagggccacgaactgccatattctcgtaaacggcaccacgttcagtatctgcaggctgtcggagttagcgatgccctgcgccacggcggcatacagcccccattgcaggccaaaggcgatcaccgcgctgaacaggcccagcagcagtccctcatacacaaagggccagcggatgaacccgttggtggcacccaccatcttcatgatggcgatctcgtcccgccggtcgaatgtcgtcagcttgatggtgttgctgatgatgaacaccgacaccagcagcagtatggcgatcagcgcgacagagatgacgccggccacgttgcggactgtggtaaagccgttggccacagcctcgtcagcgcgggccttgtcaatgccggggatattgtccactgcggtctttgtctccatgattcggttcggatccgtgacgtgtatcacaaaccgatggcggaacaccgtggcgtccaggtcgccgtacacaccgccgtcatcgtacttctccacgtaggcgtcccgggcctccgtccgtgagacgaaggtacaatcagccacgttctccgtgctctcgatctgtgtttgcagggcccgggcctcgctctcctccagcgtctcgtccacgaaggccacgatggcgttctcctgctgtaggtccgccaggttttcgttggcattgtaggccaccagcgtgaatgtgcccataatgagcaggcacgccacggtaacgccgatggcggcgaaggacatgaacccgtgggagaacatattgcccgcgccttctttgacgaaaaatttaaaatcgtgcttcatatcacacctcgtagctgcccaggccgtcgccgatgacctgcccgtcgttcagcaggatgatccgcttgttgaagtggttgaccaggcccctctcgtgggtcaccacgatcaccgtggttcccagggcgttgatgcgctccagcagcgtcatgatctccagcgaccggcccggatccaggttgccggtgggctcgtccgccacgatggtgctggggttattcaccagcgcccgggcaatggccacacgctgctgctcaccgccggagagctggtcgggatagctgttctccttgtccgccagccccaccagctccagcacatagggaatgcggttcttcagctctcgcggagacgcccccaccgcccgcatggccagcgccaggttgtcccgcacggtcttattgccgatcaggcggaagtcctggaagatcacgccgatcgtccggcgcatataggggatctgtttttcagcgatgcggctcatggaaaagccgttgaccatcacgcggccggcggtgggcaccacctcaccggtcatcagcttgatgatggtggacttaccggagccggagggccccaccagaaagacgaattctccgtcgtccacggtaaaggaaacgccctttaacgcgcgcgtcccgttgtcgtataccttctcagcgtctattaaacgaatcatagcaacgctcctgtccgtcaaaatgcaacatattgtggccaaatacgaccacaaataccattatatataaatagttacaaaatggcaacaggaaagatatgaaaatattttgaatttgccccgccgcgcattgcttgttctttagacggtcctcccaccccaaaagttcctaaaaaaggaagtttctgcggcatcgcgcaaaaagagcgccccacagggcgctcttttttctgtatatgtacttatgcgtcgatgccgcggctggtcagatacttcttgaccatcagggcgaccttgaaggtgatggcgtcatcgaactcccgcagatccaggccggtcagcttcttgatcttctccagacgatagaccagcgtgttccggtggacaaacagcttacgcgccgtctcggatacgttcaggttgttctcaaagaacttgtagatggtgaacagcgtctcttggtccagtgcatcgatggggttcttcttgaacacctcctgcaggaacatctcgcacagggtggtgggcagctgatagatcagccggccaatacccagattttcgtagttgatgacgtagcgctccgtatcgaacaccttgccgacctcgatggcgatctgggcctctttgtagctcttggccaggtcacgcagatgcagggccagggtgccgatgcccacgaacacgcggctctctccatcggcgcgcagggcctcctcgatgcggagagccacctcctccatatccttggcggtggcatcctcccccatctggtggatcagcgccacgtcgtgctcacctacgctcagtacaaagtcgttctgccggtcagggaacaagccctgcaccacatccacgggcacggtgtccagccgatcgtccaccgggcgcaccacgaacacgccgcgggccacctcggcatccacgtgcagctccttggcccgcatatagatgtcactgatgaggatgttatcggaaatgatgttcttgatgaaggagcccttgtcgtgcttctcctcatagtagtttttggcggcgttcagcgccacggcggccatagagcacaccgtgcggctcatgctgtcatcgccggtggcgaacacggcatagtcaaaggtgttgccccagctgggcaacgccttgaagcacttgccctccagcgccacgcaggtgccgtccgccgaaacgataggttccacatatttgctccatcgcttgccaatggccgtcagctcactgcaagcgataacggtgccctcggcatcgatcacgccgatggtacggtcggtggtctctttgaattggagtacagagttctgaaaaattctgccggacataacgtgatcctcccgcaaatcccgcgacggtactttgtgcaatctgctcagtcgttgctcctattatatcgtcataatcacgattttgcaagcgtttttttctcttttccacaaaaaacttgttgcgttttttgcggttatgtcaaaaaaatcacagaccacatgcacggtataacgctaatatctcctccgcgcgcagcaaacggtacgctccggcagccaaggagtcatccaatgtcagaggccccatggacagccgcttcagatacagcaccggcgcgccgcgggctgccagcatccgcttgacttggtggaatttcccctcccgcagcgtcacgatacacacgcggtcaggcagaacctccagcccggcgggcaggcattccagcccgtcccccagcgtcatcccgcgggcaaatgcctccgtatctgccgctgacagttcaccgtccacccgggcgaggtagcgtttgtccacgtggtatttagggctcagcagccggtgggccagctcgccgtcgttggtcagcagcagcaagccctccgtgtccttgtccagccggcccaccggggcaagaccaatgcggcgcagctccggcggcagaaggtccaggaccgtgggctgctttctgtcctcggtggcggtgaggacgccggcgggcttatgcagcataacataggtaaagcggcagagggagatggtctcgccggccacggtgatgatggccgcggccgggtccagcttgtcctcggcggaggcggccagccggccgtcaacacgcaccaggccctgccgtaccaacgctttcacctcccggcgggaccacttcccagtgcccgccagcagcttgtcgagacgctccataggccgcctcctttcggatttttaccctatgatagcatattctcatcagattgaaaataggtaattatgaggtgatgaatatgatgatattacatatatccaaacggcgcattgccgttatggcggtgtcatttatggtgatcgctgccgtaaccgtggtgttagccgggtgcttctctgacaaggaaaataccattacacttgccgacaccgcagaaatggcggactatttacagcagttgggctggcaggtggagcctgatccgatcgagacgctggacctgcagcttccccagagcctgggcgacacctggggcgactacgccgccatgcagaccgaacagggcctcccctttgcagactttgcgggacagccgatacggcgctacacattccgcatcaccaactatcccggaatggacgggggcgtgcaggctaacctgtacctgtgcggtgatacgcttatcggcggggacgttgtggccaccgggaagggcggcttccagcacggactgacatatcccgcggtatagatcgcaaatcagaatatattttgacatatctcgtcagaattatacaaattgttttcgaacattggcaaaaaagaggaagccttacggcttcctctttttaattggctttgtccctgtggggtcagattactcgtcgatctcgatgacgacgccggaacccacggtacggccaccctcacggatagcgaaacgcagaccgttctcgatagcgatgggggtgatcagctcgaccttcatgtcgacgttatcgccgggcatgcacatctcggtgccctcgggcagggtgatgacgccggtcacgtcggtggtacggaagtagaactggggacgatagttgttgaagaagggggtgtgacggccgccctcgtccttggtcagaacgtagacctggccaacgaacttggtgtggggatgaatggaaccgggcttggacaggacctggccgcgctcgatctcggtcttggcaacaccacgcagcagggcgccgatgttatcgccggcctcagcgtaatccagcagcttgtggaacatctcgataccggtaacggtggtctcgcgcttctcatcggacagaccgacgatctcgaccttctcgttcaggttcagcttaccacgctccacacggccggtagccacggtaccacggccggagatggtgaacacgtcctcgacgggcatcaggaagggcatatcctccttgcggtcgggggtggggatccactcgtcaacagcgtccatcagctccttgatgcaggcatactcgggagcgttgggatcggtggactcggaaaccagagcgttcagagcgctgccgcggatgatgggggtctcgtcgccagggaagccgtagaagtccagcagctcgcggacttccatctccaccagctccagcagctcctcatcgtcgacctggtcgcacttgttcaggaagaccagcacggagggcacgttcacctgacgggccagcagcaggtgctcacgagtctgagccatggggccgtcggaggcggcgatgaccaggatagcgccgtccatctgggcagcaccggtgatcatgttcttgatatagtcggcgtggcccgggcagtcaacgtgcgcatagtgacgcttggcggtctcatactccacgtgagcggtgttgatggtaataccacgctcgcgctcttcgggagccttatcgatggaagcgtaatcggtgtactcagcaccgccctgcagagccagatacttggtgatggccgcggtcagggtggtcttaccatggtcgatgtgaccgatggtgccgatgttaacgtggggcttagttctctcaaatttctgcttagccatttgaaatgatcctccttaacatttttgtatcgtgtgtggggcagcgttacaatctaacactgccattttacagtattttggtgggaaaatcaatcgtaaaatacggttttagaaattttcccggccggtgcgcttggcgatcagcttctcctgcaggcccttgggcagctcgatatagtggctgggctccatggtgtactgaccacggccctgggtgcgggaacgcaggtcggtggcatagccgaacatctcggccagcggcacgaacgcgtcgatctgctgtgcgccggaacgcatctcatagccctggatctgtccgcgccgggcattcaggtcgccgatcacatcgcccatgtactcgtcggggacgatgacacagaccttcataatgggctccagcagcgtgggatccgccttacgcatagcctctttgaaggccatggaaccggcgatcttgaacgccatctcggaggagtccacctcgtgataggaaccgtcgaacagggtgaccttgacatccaccacgggatagccggccacggtaccggagagcatggcgccctggataccggcatcgatagcggggatatactccttggggatggcgccgcccaccacggcgttgacaaactcgtagcccttaccggactcgttgggctccacgtggatcttcacatgaccgtactggcccttaccgccggactggcgggcatacttggtatcctgatccacagccttgcggatggtctccttgtacgccacctggggcgcgcccacattggcctccaccttgaactcgcgcagcaggcggtccacgatgatctccagatgcagctcgcccataccggcgatgatggtctggcccgtctcctcgtcggtgtaggtgcggaaggtggggtcctcctcggccagcttggccagagcgacgctcatcttctcctgaccggccttggtcttcggctcgatggccacgcggatcacaggctccgggaactccatggactccaggatgatgggatgcttctcatcacacagggtatcgccggtggtggtattcttcagacccaccacggcggcaatatcaccggagtagacggactcgatatcctcgcggtggttggcgtgcatctgcaggatgcggcccatacgctctcgcttgcccttggtggcattgaggaccgaggaaccggtggtcagcgtgccggagtagacacggaagaagctcaggcggcccacataggggtcggtcatgatcttgaacgccagggctgcaaacggctcgtcatcggaggacttgcgctcctcttcctcgtcggtcttggggttgacacccttgatggcggggacatcggtgggagcgggcatataatccacgatggcgtccagcagcttctgtacgcccttgttgcgatagctggagccgcaaaccacgggcaccatctccacggcacaggtggcctggcggatggcggcacggatcttggcggtggggatctccttcccctccagatacagctccatgatctcatcatcgaacatggagaccgcatccagcagcttctcgcggtactcgttggcaaggtcgaccatatcctcggggataggctccacgcgcatatccttgcccaactgatcgtaatagatatcggcatccatctccaccaggtcgatgatacccttgaaggtatcctccttcccgatgggcagctggatggggacggcgttggccttcagccggtcgtgcaccatgtccagcacgtgatagaaatccgcgccggtgatgtccatcttgttgacgtagatcatccgggggacatggtagtgatcggcctgacgccacacagtctcggactggggttccacaccgcccttggcacacatgacggtgacagacccgtccagcacacgcagagaacgttccacctcaacagtgaagtccacgtggcccggggtgtcaatgatgttgatacgcgtctgggggaactgatccttggagcccttccagtagcaggtggtcgcggcggaggtgatggtgataccacgctcctgctcctgctccatccagtccatggtagcggtaccctcgtgcgtctcacccagcttgtagttcacgcccgtgtagtacagaatacgctctgtggtcgtggtcttgcctgcatcgatgtgtgccatgatgccgatatttcttgtgttttccagtgtaacctttctcggcataccgttctcctttttgtgtcgttggtatgattaccagcggaagtgggcgaaagccttgttggactccgccatcttgtgggtgtcctcgcgcttcttcacggcagagccggtgttgttggcggcgtccatgatctcgccggccaggcgctcggccatggtacgctcaccgcgggcgcgggagtagttggtcagccagcgcagacccagggtctgacgacgggcgggacgaacctccatggggacctgataggtggcaccgcccacacggcgggccttgacttccaggctgggcatgatgttttccatcgcctgggtgaacacttccagaggatccttctcggtcttgtccttgatgatgtcaaaggcaccgtaaacgaccttctgggcgacgccctttttaccgtccaacatgatgctgttgaccagcttggtcaccagcacggagttgtacataggatcgggcaagatctctctcttgggaacattacctcttctgggcactatgcttccctccttcataaaaatatgatttcacaggtactcaacagcttgcgaaggctgttgtacggcctgccaaagaggtatttttatatatagtatataagaaaccttttcggcaaagctcatgctgcaagttttacttgctcttggggcgctttgcgccgtacttggaacgggcctgcatacggccggacacaccctgggtatccagcgtaccacggatgatgtggtaacggacgccgggcaggtccttgacacggccgccgcggatcatcacgacggagtgctcctgcagggagtgacccacgccggggatgtaggcggtgacttcgtagccgttggtcagacgcacacgggcgatcttacggagcgcggagttgggcttcttgggggtcgcagttctgacggcggtgcagacgccacgcttctggggagagctcaggtcggtctccttgttcttcagcgtattcaggcccttctgcatagcgggagaattggacttgtaggtgctcttcttccggccctgcttgaccagctggttaaaagtaggcatttggtttctcctttcgtaagatttgtgggacgtatgtccctttatttttccacggaacagagggtatctattccggatggaacgttattcagccgttcaggacggccacagcggcggcaggcacggcgataccgcaggcagtacccagctgccgcagcgtcatgctgctgtcacaggggatggccttttccgcgcacagggcgcgcaggggatcggtgagccggggatcggcgtcacaggccagatagacgtgggcggcagcaccctggacaagggcacgacgggtctgcttcaagcccacgacttttcccttggcggtcagttctccgggcacaggcgctctcctcctgtcgtcgcataacaaatcccgcgggcaattcccgcgcaatttgaaattatagcatagctgcgcggaagcgtcaagtgtgtttcgcgggaaagtttgtgaattccactgaaattccacggataatttcggaagatatcacgaaaagctaccccggatgcgcttccggcgtccggtgaaaagaggaggccggagggcctcctctttcagatgttcggtttcggcttacagcgcgtcgccggtgtccgtctcgggaccgtcgctctcagggagctccgtctcgtccatgtccgccggcgcctccacaggtgcggggacctccgtgtgcatggcctcggcctcgtccttcttctcggcctcggtctcggggaccatctcctccgccagctggcggtaagcggtcaggccggcgccggcggggataagcttgccgatgatgacgttctccttcaggccgaccaggtggtccaccttgcccttgatggcggcctcggtcaggaccttggtggtctcctggaacgaggcggcggacaggaaggagtctgttgccagagaggccttggtgatacccatcagcagctgggtgtaggtggcctcctgcagctcctcgccgtcctcacgcttctcgccggcggcgatacgggcgcggaccgctgcgttggcgtcctccacctccatcacgtcggccatagcgccggagagcagcccctcggcgtcgttggcatcctccacgcggaccttacgcatcatctggcgcacgatgacctcgatgtgcttatcgttgatatccacgccctgctgacggtagaccttcaggacctcctggatcaggtagttgtggaccgcggaggcgccgcggatacgcagcacgtcgtgggggttcagtgcgccgtcctgcagctgacggcccttctcgatgacctcgccgtcctgcaccagcaggccggtgtggggcaccgcgtaggtgcgggtatcgccgtcatcggcggtgatgatgatattcagcaggctgcccttggtagcctcctcgaagcggaccttgccgccgatctcggcgatggtggccatcttcttgggcttgcgggcctcgaacagctcctccactcggggaagaccctgggtgatgtcgccgccggccacgccgccggtgtggaaggtacgcatggtcagctgggtaccgggctcgccgatggactgggcggcaatgatgccgaccgcctcgccggggccgacgggcttgctggtggccaggttcataccgtagcacttggcgcagataccgctgtgggcacggcaggtgagcacggtgcggatctcggcggagtggatatcgaaggactccatcagcgcggcgtcgtcctcggtcatcatgtgatccttggagatgagtacctcgtcggtgccgggcttgaggatatcgcggaccgggaagcggcccttgatgcgctcggagaacttctcgatgacctgaccgccctcgctgatctcagacaccacgatgcccttttccacaccgcagtcggcctcgcggatgatgacatcctggcagacatccaccatgcggcgggtcagatagccggagtcggcggtacggagggccgtatcggccaggcccttacgggcgcctcggctggaggtgaagtactccagcacggacaggccctcacggaagttggccttgatggggatctcgatagtcttaccggcggtgttggccatcaggccgcgcataccggtcagctgacggatctgcttcatggaaccacgggcgccggagtccgccatcatgaagatggggttgtacttgttcatgttggcggtcagggcgtcagtaacgtcggcggtggtcttttcccactcgcggaccaccagcttgtagcgctcctcgtcggtgatgaagcccatgttgtactgatcctcgatctccaccacgcgcttttcggtctcgtcgatcagctcgtacttggccttgggcaccgtcatatccgcgatggagatggtgatggagccgcgggtagagtacttgtagccggtggccttgatgttgtccagcacctcggcagcgatggtgaagccatactgcttgatggtcttgtcgacgatcttgcccagcagcttcttgccgcaggtctcggtgatctcgtagtcaaagaacttgtcggagggtgtaccgtcctcgttgaagcgcttgacaaagcccaggtcctgggggatgttgcggttgaagatgatgcggccggcggtggcgcggaccacatgactgaccttcacaccgttcagctccttggtcacgcggacccagatgggctggtggataccgatgatgtgctcgttgtaggccatcagcgcctcgtcctcatcgcggtagatgttcatgtggacggaggctttctcctcttcggtaagctcatcgtaggtcttgccggccagggcgaagtccacgccctcgggccagtactcgtcattggtcatctggcagcagccgttttcgaagcgctcgaaggtcaggtagtaggagcccagcaccatatcctgcgtaggcacggtgacggggccgccgtcctggggacgcagcaggttgttggcggacagcatcagcagacgcgcctcggcctgtgcttcggcggacaggggaacgtggatagccatctggtcgccgtcgaagtcggcgttgaaggccgtgcagttcaggggatgcagcttcagggcgcggccctccaccagcaccggctcaaaggcctgaatgcccaggcggtgcagcgtaggcgcacggttcagcatgacggggtggtccttgatgatctcgtccagcgcgtcccacacctcggtgcggcccttgtccaccatcttcttggcggacttgatgttgttggcgctgccatcctccaccagcttcttcataatgaaggggcggaacagctccacagccatctccttgggcacgccgcactggtagatcttcagctcgggaccgaccacgataacgcttcggccggagtagtccacgcgcttgcccagcaggttctggcggaaacggccctgcttgcccttgagcatatcgctcagggacttgagggcgcggttgttggcgccggtgacagggcggccgcggcggccgttgtcgatcagggcgtccactgcctcctgaagcatacgcttctcgttgcggacgatgatatcgggggccttcagctccatcaggcgcttcaggcggttgttgcggttgatgacccggcggtacaggtcgttcaggtcgctggtggcgaagcggccgccgtccagctgcaccatgggacggatctccggggggatgacgggcagcacatcgatgaccatccactccggcttgttgccggacaggcggaaggcgtccaccacctcaaggcgcttgacgatgcgggcctttttctggccggaggtggtcttcagctcggtgtgcagctgctcgctcagctgctccaggtcgatctgctgcagcagctccttcacggcctcggcgcccatgccggcgcggaagtcgtcctcgtacttctcgcgcatatcgcggtattccttctcggagaggatctggttctgggccagaggcgtctcgccgggatcggtgacgatataggcggcgaagtacagcaccttctccaggatacgggggctgatgtccagcagcaggcccatgcgggaggggatacccttgaagtaccagatgtgactgacgggggtagccagctcaatgtggcccatacgctcgcggcggaccttggcacgggtgacttccacgccgcagcggtcgcagatcttgcccttatagcggatcttcttatacttaccgcagtggcactcccagtccttcgtcggcccgaaaatgcgctcacagaacaggccgtcgcgctcgggcttcagagtacggtagttgatggtctcgggcttctttacctcgccgtaggaccactcgcggatcatttccggagaagcaatgccgatcttgatggcatcaaaggttgcgtaactcataattcagctcctccctttccttaaaactcgtcgccttcgtcgtcataggaagcgtccacttcctcgtcggcgacgtagtcgaagcccgcatccgccagctcatcctcgtcggcgtagcggttctgtctttcgttgtcggcatccatacgggccaggttgaaggtatccagggcgtcctcgtcctccttcagctcgatctggttgccgtcggcatccagcacctggatatccaggcacagggactgcagctccttgaccagcaccttgaaggactccggcacaccgggcgtgggcacgttgtggcccttgacgatggactcgtaggtgcggacacgtccggtcacatcgtcggacttgacggtcaggatctcctgcagggtgtagctggcgccgtaggcctccagcgcccagacttccatctcgccgaagcgctggccgccgaactgcgccttgccgcccagaggctgctgggtgaccagggagtaggggccggtggaacgggcgtggatcttatcatccaccaggtggtgcagcttcaggaagtagacatagcccacggtgaccttgttgtcaaagcgctcgccggtacggccgtcgtacagccagctcttgccctcgggatccaggccggccagctccagagcctccgcaatgtccttgtcggtggcgccgtcgaagatgggcgtagccaccttccagcccagagtcttggccgcgtagcccagatggacctccagcacctgaccgatattcatacggctgggcacgcccagggggttcagcacgatatccagcggggtaccatcgggcaggaagggcatatcctcctggggcagcacacgggaaacgacgcccttgttgccgtgacggccggccatcttgtcgcccacctggatcttgcggcgctgggcgatgtagacacggacgacctcgttgacgcccgggctcagctcgtcgccgttctcgcgggtgaacaccttggcgtccaccacgatgccgctttcgccgtggggcaccttcagggaggtatcgcggacctcgcgggccttctcgccgaaaatggcgcgcagcaggcgctcctcggcggtcagatccgtctcgcccttgggcgtgaccttacccaccaggatgtcgccggcgtggacctcggcgccgatgcggatgataccgcgctcatccaggtccttcagcgcgtcctcgcccacgttggagatatcgcgggtgatctcctccggccccagcttggtatcgcgggcatcgatctcgtattcctcgatatgaatggaggtgtagacgtcctccttgacaaggcgctcgttcagcaggacggcgtcctcgtagttgtagccctcccaggtcataaagcccaccaggatgttgcggcccagggcgatctcgccctgatcggtggcgggaccgtcggccaggacggtgggatcgtcgccgccgtggacacgctcgcccacagagacgataggcttctgattgatacaggtaccgtggttggagcgcaggaacttgatgagcttatagtccttcgtctcgccgctgtcatacttgacggagacgttggtggcatccaccttggtgacgacaccgtcgccctcggccagcacggccacctcggagtccaggcagatcttgtgctccatgccggtacccacgatgggggcctccggcttcagcagcggcacggcctgacgctgcatgttggcgcccatcagcgcgcggttggcgtcgtcgttgggcaggaaggggatcatcgccgtggcgatggacaccatcatgcggggagagacatcgatatagtccacgccgctgcgggggacctccacgatctcgtcgcggtggcggcaggtgatacgctcgttggtcaggcagccgttcttgtccaccggctcggcggcctggcccaccacaaactgatcctccacgtcggcggtcatgtaggtgatgtcgtcggagacgtgacctgtctcgtgatccacggcgcggaagggtgcctcgataaagccgtattcgttgatacgggcatacgtggccagataggaaatcaggccgatgttgggaccttcaggggtctcgatggggcacatacggccgtagtgggaatagtggacgtcgcggacctccatgttggcgcgctcacggctcagaccgccggggcccagggcggacagacgccgcttgtgggtcagctcggccagggggttggtctggtccatgaactggctcagggggctggagccgaagaactccttgatggccgcggtgacaggccggatgttgatcaggctctggggcgtgacgatatccagatcctggatggtcatgcgctcacggatgacgcgctccatgcggctgaagccgatgcggaactggttttgcagcagttcacccacgcagcgcaggcggcggttgcccaggtggtcgatatcgtccttggtcaccagaccgtgggccagggcgttcatgtagttgatggacgcgaagatgtcgtccacgatgatgtgcttgggcaccagatcgtcggcgtggaggcggcactgcttcaccagctcgtcgccgctgtacttgcccagcagctcctgcagcacatcaaagcgcacgcgctccttgatgccgcagagctcacggggatcaaagtccacatagtggcgcatatcgcacatcttgttggtaaagatgcggatggtgtcgccgctgtccagcgtgacgctgacctcaggcacgcccacggtgtccagcagggtgcagtcgtcggcggtgagcacatggccgtcctcgaacaggatctcgccggtggcgggatcggccacgggcatggccagcttctgacccttggcgcgggtccagaaggtcagcttcttgttgaatttgtaccggcccacggtgctcaggtcatagcggcgcgggtcgaagaacaggttttgcagcagcgtctcggcagagtccagcgtggggggctcaccggggcggagcttgcggtagatctccagcatggcctcttcataggtcttgcaggtatccttttccagggtagccacgatgcggcggtcatcgccgaagcgctccaggatctccgcgtcggtcttcaggcccagggcgcggatcaggcaggtgatgggcagcttgcggttcttgtcgatacggacccagaacacctcgctggtgtcggtctcgtactccagccacgcgccgcggtaagggatgacggtgctggtcagcagcggcagatcggtcttcagatcgatctccttgccgtaatagatgccgggggaacggacgatctggctgaccaccacgcgctcggcgccgttgatgacgaaggtgccgccgtgggtcatcagggggaagtcacccatgaagatctcgttctccttgatctcgccggtctccttgttgtgcaggcgcaccagcaccttcatgggggcggcatacgtggcgtcgcgcgccttgcactcctccacgtcgtacttgggcttttcgtccatgctgtaatcaatgaagctcagttccagattaccggcatagtccacgatagaggccacatcggcaaacacctcgcgcaggccggtatccaggaaccactgataggacttcttctggatctccagcaggttgggcattgccatgacttcctcgtggcgggcaaagttctttcgcagggtcttgccgtagtacttgtctttcgccatctctacgatcacgcctttctgttcttatttccctcccgcagccgctgacctgtgaggccgcgggggcgctccgtcgcgatacgcacgggtctgttggttcattttgaccacaaccccttgtgctttgccggcggagatggtatactgcacatagatgaaagtggggctatgccgccactttcccaatataaagcaagtcattataccaatttttttccatattgtcaatgggttttccaccggtttttccggtggatctttgtattataacgaaaaactcgcccgcgggaagaccccacgggcgggttttcttttgttatacacagcgttccagccgcgcgaccgtctcgatatgtgcatcattgctcaaactcaaactcatatcctccgcgatattcgtgagcagcatcatcccgactccatgactgcggatgaaatctcctttgcagaaaatatgcagaacctgttgcaggatgcgatgaactttgatggaagctccgaggaaaagaaagcaaaagcattgcttgctacattggggattgattacgatgccatcacaatggaacagtttgtcaacttgatcgaggttctaaagctgtccaagcacctgaaaactcccatcagccggcgcgggaaaacgaccatgacccatggcaagagaaaacggaagaaacgctgaaacggggagcgtcgctgcggcgggacgggggcttttgaaaagaatattgctttttccttcccaaagtgctataatcggtatataccgaaaacgaaggagggtgtgcccatgccaagaccgccacggtgccgtcggatttgtggcgcaccacaagtcgataccttccgccccaacgggtacaaggataccgagccgatcctgctgacgctggacgaatacgaggtcattcgactggttgacctggagcagcaaacccacgagcagtgtgccgcacagatggacatttcccgctctaccgtgcaggagatttacgaagtcgcacggcgcaagatcgcagcgtgtcttgtccacgggaaaccgctgcacatcaccggaggaaactaccgcatctgcggaggacaggaggcagtccactgcggccgctgctgccggatgcagagagccaacacagaaaaatccaacaaaaaatgcgaaggagattccattatgaaaattgcagttacctatgaaaacggtcaaatctttcagcatttcggtcacacggaacagttcaagctttatgaagctgcggacggcaaaatcacgcatgcggaagttgttgataccaacggcagcggtcacggcgcactggcaggcttcctgatgcagaacggcgtggacactttgatctgcggaggcattggcggcggtgcgcaggcagctctggccgaagcgggtatcaagctctacggcggtgtcagcggggacgctgatgcggcggtgagcgcattgctcagcggaagtttgggctacgatcccaatgttcactgtgaccaccatgaccacgagcacggagaggctggtcacacctgcggtgaccacggctgcggcaagcatagctgccattgatatggaacgcacactgacacagctcccgttctggtcatcgttgaccgagcaggagcaagaaacgctgcaccgaagtgcctttgtccgtcattatgaaaagggcgcgttcatacacagcagcgacaacgaatgtctcggaatgctgttcgtcctttccggcgagatccgcacctatcttctctccgaggaggggcgggaggtaacgctgttccgcctgtatccgggcgaactatgcgtgctttctgcctcctgtgtgatcagtcagatcacctttgatacgcaaatgaccgcaggaatggatacggaggttctgattatccctgcaaatgtcatcgctgcgctcaaagagaaaaatcttcatgtccgctgcttcctctatgaactggcaacgaaacggttttctgatgtgatgtgggcgatgcagcagatcatgttcaaggggctggatcggcgactggcagaatttctccttgtcgaagcggagcgtaccggctccgacacgatacgcatgacccatgagcagatcgcccagcacatcagctcggcgcgggaggcggtggcgcggatgctcaagagcttctcggaggacgggcttgtggaactaagacgaggcgcaatcacgctgcgggataagaacagactaaatcgcctaaaataaaaaaaatgtaaccttgtcacagaaagaaatcataaatttggtacaataaaagcagaaaagctgaaaggagcgtcgaccatgaaagaaacgaaatacgcaggtactcaaaccgaaaaaaatctgatggctgcctttgccggtgagtccgaggcgcgcaacaagtacacctattttgcatccaaggccaagaaggaaggctacgagcagatcgcggcgttgttcctcaaaaccgctgataatgagaaggaacacgccaagctgtggttcaaagagctgaacggcattggcgacactgccgaaaatcttctcgccgccgctgagggcgagaactacgagtggacggatatgtacgacggctttgccaaaaccgccgacgaggaaggtttccatgagctggcccagcgtttccgcctggtagccgccattgaaaagcaccatgaggagcgctaccgtgccctgctgcacaatgtggagacggcgcaggtctttgccaagagtgaggtcaaggtatgggagtgccgcaactgcggtcacatcgtcgtcggcgagaaggcacccgaggtctgccccacctgcaaccatccccagagctactttgaaattcacgcggaaaactattaaagagaaaaggagaacgaatcatggagcagaagttttacatttgcaagcattgcggcaacatcattgccaaggtcaaggacacgggcgttcccgtcatctgctgcggtgagccgatgagcgagatcatccccggcaccaccgacgccgccgtggagaagcacgtccctgtctggactgtggaaaacggcatcgtccatgtcaaggtcggctccgtggagcatcccatgctgccggaacactacatcgagtgggtctctctccacaccaaacagggcaaccagcgcaaggaactgcgtcccggcgagaatccggaggtctgcttcgctctctgcgagggcgatgaagtcgaagcggtctacgcctactgcaacctccacagtctgtggaaagcataattcatcctcttaaaaatccggtgctcaaaaagcaccggatttttttatcaatgtgacctcgtcacagaaaaaggctttgtcctgcggtatgataaagccacgatcaagaaacaagaaagaggtggcgaacatgaaaatcaagctcaatcccgatcaggagatcgtcaataccatcagagaagggctcaagcgcactggcggatactgtccctgccgcagggagcgcacagaggcgaccaactgtatgtgccaggagtttaagaatcaaattgcagatccgggcttcgagggattctgccactgtatgctctattacaaatccttgcaggattaagggaggaacgctatgctgtcgaagaaactggccgccgtagataaaacgcggtgcgtcgcctgcggtgtgtgtgaaaatacctgtccattggaggccgtcaaggtgcgccgcggctgctacgccgccgtggaggcggagcgctgcgtaggctgcggcaaatgcgcaaagctctgtcccgtcggctgcattgaagtgaaagtgagggctgacgcatgaaagcaaagcattggtacgattacctgtgggtatatgccatcatctactttgcactgggctttttcaatatcctgtttgcatggctgggcatgatcgattttcttctaccgctgttcttagccatctttggcggaaacaaattcttttgcaaccacctctgcggacggggtcaactgttcagcaagctggggacagaccttaaatgctcccgctgcaagcccacgccccgctggatgtcctccaaatggttccgttatggctttttgatctttttcctgacgatgttcggcaacatggtgttccagacctatctggtcgctgctggtgctgcgtccctgcgggaggccattaagctgttctggaccttccgtgtgccgtgggactggacttacacaacttacacagccgggacggtcactgactgggtggcgcagttcagctttggcttttacagcctcatgctgacctctctgctgctaggtctgatcgttatggtgctctacaagccccgcacatggtgtgcgttttgccccatgggaaccatgacgcagggtatttgcaagctgaaaaacaaagaatcacaaaagatcaacgaaaggagtcattctcatgactgaactgaaaattactgctgcgaattttgaaaatgaggtactgcattccgataagcccgttttgctggatttctatgcggactggtgcggaccgtgcaaaatgctctctcccgtactgcatgagcttgccgaagaaacaagcggtacgctcaaggtgggaaaggtcaatgtggatgagcagatggagctggcgatgcgttttcaggtatccagcatcccgatgctggtcgtattcaaggatgggaaagccgttgccaaatcggttggctatcggcctaagtcggagatcgccgcaatggtggaagacgcaagatgaaagttgtgattgtaggcggtgtggcgggcggtgcttctgccgccgcccgcatccgccgtctggatgaacacgcgcagatcgtgatggtcgagcgcagcggctatgtgtcctatgccaactgcggcctgccgtattatgtgggaggtgtgatcaaagatcaggaagaactgacactccaaactccggagagcttttgggatcgctttcgcattgatgtgcgggtacagcaggaagtaactgcgatcaatcccgcagaaaaaaccgtcaccgtccgcgcactgaacagcggaaagagctatacggaaacctatgacaagctgctcctcgcccccggcgcaaagccgacggttcctgcgctttccggcgtggacagcgagcgggtatttaccctgcgcaccgtggaggacaccctccgcattaggcgctttgtagaggatcagaaaccgaaaaccgctgttttggctggcggcggctttatcggtctggaaatggcggaaaaccttgcagaaatgggcgtttccgtcaccatcgtccaacgtccaaagcagctattagcgccgctggatagggatatggccagctttgtccatgcggaaatgcgcagacacggcgtggctctgcggttgggtgaaaccgtcaccggattccggcaggacggagattccgtgctgacgctgctggaggaaagtgagccgctgcgctccgacatggtgctgctggccatcggcgtcacgccggacacccatctggcaaaagaggccggacttgagctgggcatccggggcagcatcgctgtcaacgagcggatggaaacctccgtgccggacatctacgctgtgggcgatgccgtagaggtcacccatttcgtgaccgggcagaaaacgttgatctcgctggcggggcctgccaacaagcagggacgcattgccgctgacaatatctacggcggaaacagccgctttcacggctctcagggctcgtctgttctgaagctgtttggcttgacagcagcctccacggggatcaatgaaaaggcagcgcaggcagcagggatcacttacgacaaagtcgtattgttcccagcatcccacgccacctattaccccggcgcacagtctatggcaatgaaggtactgtatgaaaaagaaagcctgcggctgctgggtgcacagatcgttggcggcgacggtgtggacaagtgcattgatgtactggcaacggccattcgcgcaaaaatgaccgctctggaactgacggagcttgatctttcctatgcgccgccctattcctccgccaaggatccggtaaacatggccggttttatgatcgaggatttggagagcgagaaagtgcggcagttccattggaatgaggttgaagacttgccttgcgatggcagtgcgacgctgctggacgtccgcacggcgtgggagtatcagcggggccatctggatggctttcggaatattcccttggacgatctgcgggagcacttggacgagttagcccgtggtaagcctgtttatgtgaattgccagacagggcttcgcagttatctggcctgccggcttttgacgcagtatggttttacctgtgcccatctctccggcggatacagcttttatcgggtcgtaactaaagagcagcagacagcgcggagcgcctatccctgcggaatggagaagctatgagtgaaaatctattcggtttgacggttgcggcagataaaggcttggatgatctgcaatgccagcgccttttaagtgaaaatcgcaggtatcaggaagtcatgctgcaataacataatacatcggatataaaaggacaagcatccattttagatgcttgtccttttgtatcatcagctaaatcatttcaaaatgcttcagtgcttccgtaatggctctttccttctccggcgggcattggggctgcttggcgttttcggatttcggcttattgtagttttcacgctcaatgatgccgtatttctgcttcacctgtgcgatatagaggtagctgactttcagtccggtatgctcgaaaatgtattcccggatttcctcgtaggttgccttactctccgccgaagtcaaatccagctcgtccatcttcacttcgatctcgatatgttccttgctttgaagtttggacaataaacataccgtctccacattcgccgtaccggggaacatatccaccgccgcggcgcggacggcggcatagccctcctgtgcaaacagcttcacatcacgcgccagcgtcgccggatcacaggagacgtagacgatacgctgcggcgccatcgatgccgctgcggcgaccacctccgggctgagccccttgcggggcgggtccacgcatatcacgtccgggcgcaggccccgggcggcgaagtccgccgccgcgtccgccgcgtcgccgcagaggaactccacatttccgatgccgttgcgttttgcgttttctttggcatcggcaatggcctccggcacgatctccgcgccgatgaccctcgccgcccgccgggccatcacctgggtgatggtgcccgcgccgcagtacaggtccagcaccgtctcgtgcccggtcagtcccgcgaagtccacagcggtatcgtacagcacctccgccatgtcatggttcacctgataaaaggacggcacgctcagccggaaggacaggccgcacagggtatcctccagcacgtccgcgccccacagggtgcggtattcactgcccagtacagccccggtgggctgggtgttcacgcccagcaccacgcccacggcattcggcagcgcctgccgcataaacgacaccagcgcgtcctcgcggggcagcttcttcccgttgaccagcacgcagaccaatgactgccccgcgctgttcgtgcggacatacaggtgccgcaccagaccccgccgggtcctttcatcgtaacagggcacgccgcactcccggatgtaccgccgcagggcctccgccgccgcgtcggcctggggcttctgtatccggcagcagtccaccgggatcacctgatggctgcgggccttgtaaaagcccacctgtccaccggcgtccacaggatactggctcttgttgcggtagtgcagcggcgcaccggagaggataccctccactgtcacatcgctgccgccgatgcggcgcagggcgtcctgcacccgctggagcttggcctccagctcctcttccctatccatgtggcggaagtcgcagccgccgcaccgcccatagtacgggcagtccggctccacccggtggggcgagggcgcgtatacccgcaccgccttgccgaaggcggcgtttttcagcgccttcaggatgagcacatcacagtcctcgccccgcagcgcccggtggacgaacaccgcctgcccgtcgatgcgggccacgcccaagccctcggaggtatacccctcgatgcgggcgcggtaagtcttgttcttctccggcacggctcagaactcgaacttgctgatgaccttgccgatggcatcggcaaaggcggccagcgtcttgttgtcccggcccttgctgcggcggatgagaccgatgagcatatcgcccagctggaccagcttctggtacgccgccgtggccttgggcgcgccctcataggcgcgggtcttgcgctccggcaggtagccgggggcaagctgcttgtcggcgatcaggtcatactcctcggtatactggggcgcgtgggctgcaaagcccagcccctttaccgtctcggcgtagacgggcgccacctcgcggtcaccgtggaccacgaacacatgggtagtcttcgccggatcaaagtgcttgatccagtccaccagatggtcatggtcggcgtgagagctgaggccggggaagttgacgatcttggcccggacggccacatcctcgccgaagagcttgacgctgtcggccccgtccagcaggttgcggcccagggtgcccggggactgaaatcccacgaacaccacggcgctgtcggcgcgccagaggttatacttcagatggtggcggatacggcccgcgtcgcacataccggaagcggagataatgaccttgggggtcttgtccacgttcagcagcttggactcgtctaccgtctcggtcaggtgcaggccggggaagctgaacatatgggtgccgtcctgcaccaacgccagagcgtcctcgtccagatagccccgcagatcgccgcagaagatggtggtggccttcttggccagcgggctgtccacgtacaccgggaagtccttgacggacgtgaccagatttttatccttgatctcgcggatgaaatacagcagctcctgggtgcggcccacggcgaaggaggggatgaccacgttgccgcccttgcccagcgtctcgtcgatgatctccgccagctggccggtgtagctccacacctcggtgtgattgcggtcgccgtaggtagactcggtgagcacatagtccgcgctgtcgaagaactggggatcgcggatgatgggctgatccacattgccgatatcgccggagaacaccacggtgcgcgtttcatcaccctcatggcaggtgagcttgatgctggcgctgcccagcaggtggccagcatcgatgaactgcgccgtcacgccctccaccacgggaatgtcctggccgtattcgcaggtctggataaactcccgcacccgcagggcatcggccacggtgtagatcggctctacctccggacgtccggcgcgcttgttcttgcggttctgatactccgcgtcctgctcctggatatgggcggagtcctggagcataatgtccagcagatcggcggtcaggcgggtggtaatgatcttaccctgaaagccgtttttgatgagcatggggatgcggccggagtggtcgatatgggcgtgggtcaccagcaccacatcaatgctgccggggtgaaagggcagcgcggtgttgtcgatctcgtcccggccctgctgcaggccgcagtccaccaggatatgcttgccgttgacctccagacaatggcagctgccggtaacgcaccggtcagcgccgtaaaaacgcagcttcatggcgaaaactccttctctttgatagtatcgtcagtataccacacttttccgcgctgcacaaccgcaaagcggcacgactgaccgataactgttcacagaaaatctttttgcattagacaaaagagtgtggtatactctactggtataattatgtacgattatctttttacttagaaaggatacagaatatatgggactgtttaccaaggtcttcggcacctacagccagcgggagctgaagagcatctaccccatcgtggacaagatcaccgcactggaggacgagtacaagcagctgaccgacgccgagcttcaggccaagaccccggagttcaaggagcgtctggccaacggtgagacgctggacgacatcctgccggaggcctttgccgccgtgcgggaggccgcggaccgcgtgctgggtatgcgcccctatcccgtccagctggtgggcggcatcgtgctgcaccagggccgcatcgccgagatgaagaccggcgaaggcaaaacgctggtggccaccctgcctgcctatctgaacgcgctgaccggtgagggcgttcacatcgtcaccgtcaacgactacctggccaagcgtgactccgagtggatgggcaaggtccaccgcttcatgggccttaccgtgggtctgatcatccacgacatgaagaaggaggaacgccagaaggcctatcaggcggacatcacctacggtaccaataacgagatgggcttcgactacctgcgtgacaatatggccctgtacgccaacgagcaggtccagcggggccacgctttcgccatcgtggacgaggtggactccattctgatcgatgaggcccgtacccccctgatcatctccggtatgggcgagaagtccacccagctgtacgatatggccgagatgttcgccgcccggctgaagaaatttgtggtggtggagacagacgacaaggaggaggaagccaccgacatcgacgccgactatgtggtggacgagaagggcaagagctgcaccctcaccgcccgcggcatcaaaaaggcggaggagttcttccatctggacaacctgtccgacccggaaaacagcaccatcgcccaccacatcaaccaggctatcaaggcccacggcatcatgaagcgcgacgtggactatgtggtcaaggacggcgaggtggtcatcgtagacgagttcaccggccgcctgatgttcggccgccggtactccgagggcctgcaccaggccatcgaggccaaggagcacctgtccgtccagcgtgagagtaagacgctggccaccatcacgttccaaaattacttccgcctctaccgcaagctgtccggcatgaccggtacggcgctgacggaggaggaggaattcgccaccatttacgcgctggacattatcgagatccccaccaaccgccccatcgcccgtatcgacaacgaggacagcgtgtacaagaccgagaacggcaagtaccgcgccgtcatccagcaggtaaaggcgtgccacgccaagggccagccggtgctggtgggcaccgtatccatcgagaagaacgagctgctgggcaagatgctgacccgcgagggcatcaagcataacctgctgaacgccaaaaaccatgagcgcgaggctgagatcgtggcccaggcgggccagttcggcgccgtcaccgtggccaccaacatggccggacgcggtaccgatatcatgctgggcggcaacgccgagtatatggccaagaacgacctccgcaaggccggcctcaccgacgagctcattgccgaggccaccggctacgccgaaacggataaccaggagatcctggatgcccggaagctgttcgccgagaagctggcccagcacaaggcggagatcgccggcgaggccgacaaggtccgcgccgccggcggcctgttcatcatcggcaccgagcgccatgactcccgccgtatcgacaaccagctccgcggccgtgccggccgtcagggcgatcccggcgagacccggttctacatctccctggaggacgacctcatgcgcctgttcggcggcgaccgcgtcaccggcatgatggagcgcatgaacatcgacgaggacacccccatcgagaacaagatgctctcccgcgccatcgagcaggcccagaccacggtggaaagccgcaacttccaggcccgtaagtccgtgctggagtacgacgacgtgatgaacaagcagcgcgagatcatctatggccagcgcaagcaggtgctggacggcatggacgtcaagggcatcatcatgggcatgatggagagcgccatcggccaccaggtccgcagcgccttcatgggccaggagcacctggacatggtccagtgcaaggagcttctccgcggcgtggagggcgtgtacttcaccaagtacaccgtaaagatcgacgagagccagctccccacccttaccgaggacgatttcatcgatatgttcaccaaggccgccgccgacttctatgagaaaaaggagcaggagatcacaccgcccgtcatgcgtgagctggagcgcgtggtgctgctgcgggtggtggacgaatactggatggaccatatcgacgccatgcaggacctgcgccagggtatccgtctgcgggcctacgcccagaccaacccggtggacgcctacaagaaggagtccctggagatgttcgaggagatgatcgacgccatgaaggaggagacggtgcgccgtctgtactccgttcgcctgcgccagaacgaggaagtcaagcgcgagcgcgtggccagcggcatgaccgagaacgtgggcggcgacggcaccgtgaagaagcgccccaccaaggtggtcaaggtcggccgcaacgacctgtgcccctgcggcagcgggctgaaatggaagaagtgcacctgcaaggagtaccactcctgatttcggcctatgcttctcccctgtacgctgcctacggtcgcatggcgccagccaaatcaaagatttgggccgccaaagtgcctgcggcagcgggctgaaatggaagaagtgcacctgcaaggagtaccactcctgagtaacttcaaacgacacccgcttcgctgggctgtcgtttgagcgggctgcggcctgctgcagcgcacgacgtgcgcgtcaaagtcgcgcacgcgcacgtttgcaggccgaaaatgaattcgacttgatttgcgtctgcggacgcaaactctgcgaggcattgcaaaatggcgggcggtggctgaagccgccgcccgtcccatcttaatgtagggggcggcgtccccgacgccccgtccccctccggaaggagacactatgttccacatccacacaaaaaacgacctggtctatctggcctctgatgtgttggacaacggtgccatcgtccacggcttttccacccgtaagggcggtgtctcccccaccccctgggacagtctgaacctggatgaccgccggggcgatgacctggccaatgtacaggagaacttccgccgcctgtgcaccgcgctggacacggatgtgcagcgggcggtgctcagccgtcaggtgcaccgcagcgatgtgcgccgcgtcacggcggcggactgcggcaagggcctgtggcagccgcaggactacgacagcgccgacgccctggtgacggacgtgccgggcatccccctgatcgtgttctccgccgactgcaacgtactgctgctccacgacccggtgcgccgggtcatcggcgccgctcacgccggctggcggggcaccgccgccggcatcgccgcggagacggtacgcgtcatggccgaggattacggctgcgacccggcggacctccgcgccgccatcgggccggccatcgggccgtgctgcttcgagacggacggcgacgtaccggaggccctgcgggccgcactgggtgcggcggcggagccgttcatggcatggaacggcagcaagtggcacatcgacctgaaggccgtcaacgccctgtggctgcgccgcgagggcgttacgcgcatcgacatctgcgatcactgcaccgcctgccgcccggacctgtactggagccaccggaagatgggcctgcgccggggcgagcaggccgcgctgatcgctctgcgggaggatacgctatgaaacgtgcactgctgtgcctgctgctggcgctgaccatgctgctggccgccggctgcgccgactgggaggtcaccgaggatcccctgggggagctgtccgacttctatcagaatgaaaacgaggaaccggagccggagccgctgaccgcctttaccctgccctatatcgccggcggcaccctggaccccgtccgcaccacggacaccatgcagcagaccgttgagtccctcatgtaccaggggctgttcgccctggacgagcagttccggccccaggccgtcctggcggacagttggacatatgatgccgcccagcgcacctggaccatccgcatcaaggccgatgcggctttctctgacggctccgccgtcacggcggcggacgtggccgccacgttggagcgcgcccgcacctctgaccgctatgccgcccggctgcgggacgtgacctctgtgtacgtccgggaggacgcggtggtcgtcgccctgtccgcccctctggccacactgcccagccgcctggacatccccatcatcaaagcaggcaccgagaaccgcaccgcccccacgggcagcggcccctatctgtttgccaaggatgacacgggcgcctacctgacggccaacaaccgctggtggcaggacagcagcgttctgccgctgtccaccatccgcctgcagcactgcaaggacaaggactccgccctgtacgccttcacttcccgtgaggtgcagctgctgacgctggatctcaccggcagcaacagcaccggtgtctccggtgccggcgactacgctgaagcagccacccccgtcatgcagtttctgggcatgaacacccggcgggaggctctgtccgccccggccctgcgccgggccctcagcgccggcatcgaccgcgaaacgctggtgtcctcctgcctgctgggacagggcacggcggcccagctgcctgcctcccccgcctacgcaggctacgataccgcgctggaaacgccttacgacaccgcggcctataaccgcctgctgaacgccgcccttggcgaacaggcggaggatgaaacacccctgacgctgacgcttctggtcaacgaggagagcagcttcaaggtctccgccgcccaggagatcgccatgtacctcaataccgcacgcctgaccgtcaccgtagaggctgttccctgggacacgttcctcacccggctggaaagcggcgactttgatctctattacggtgaatgccgcctgaccgccgactgggacctgacggccctgttgtccaccgagggcagcctcaactacggcggctggtccgatgagactaccgaccggctgctgcaggcctatcgggccagcggcgctgacgcgaacctggtggccctgtggcagcagctgctggacaccgcccccttcgcccccatctgctttaagtccgtatccgttgtcaccaccgagggcgtggtgcagggtctgtcccccacggagacggcccccctctcccccctgggcggctggtccgtccggctggacgcataaaaggagcgtatgccatgtcacaagtcaccaagcgggcgctggaggcgtcgctgaaaaagctgctgctggaaaagcccctgcataagatcactgtcagtgacatcaccgatgactgcggcatcaaccgcatgacgttttactatcacttcaaggacatctatgatctggtggagtggagctgtcaggaggacgccagccgcgctctggcgggcaaaaagacctacgagacgtggcagcagggccttttgcagatcttcgaggccgtgcaggagaataagcccttcattctgaacgtctatcgctccgtcagccgggagcaggtggagaactatctctacaagctgacctacgacctgctggagggcgtggtggaggagcaggcccggggaatgtccgtccggccggaggataaggccttcatcgccacgctgtacaagtatatgttcgtaggcctgatgctggactggatcagatccgacatgaagggcgatccccacctgatcgtggaacagctggaccaggtcatccacggcagcgtcgacgccgcgctggcgcgtctgcgtaccgacaagcccttatcaaacgaggccaaatgataaaaaactgaacacctgccgccccggtgataaaaaacttatcaccggggtttttctgcttattgaacaaatattcattcggatgtatgctttcatcatcaaaggaaaacatacagtggatacttgaaaggagtttatttatgtattattccagcggtaactatgaagcctttgcccgtcccaaaaagcccgagggcgtggacaacaaatccgcctatatcgtgggcagcggtctggcggccctgaccgccgcctgctatctggtccgcgacggccagatgaagggcgagcacatccacattctggaaaagggcaatctccccggcggcgcctgcgacggctataagttcgagaatctgggctacgtcatgcgcggcggccgcgagatggacaaccatttcgaggtcatgtgggacctgttccgttccatcccctccatcgaaacggagggtgtcagcgtgctggacgagtactactggctcaacaaggaggaccccaactactccctgtgccgcgccaccgttgaccgcggccaggacgctcataccgacggcaagttcgacatctccgacaagggcgccatggagatcatgaagctgttcttcacccccaacgaggacctgcaggacaagaagatcaccgacttcttcgatgacgaggtgctgaactccaacttctggctgtactggcgcaccatgttcgcctttgagaactggcacagcgcgctggagatgaagctgtatatccagcgctatatccaccacatcggcggcctgcccgacttcaccgccctgcgcttcaccaagtacaaccagtacgagtccatgatcctgcccatggtgaagtatctggagagccacaacgtccggttccattacggcgtgcaggtcaccaacgtggagttcgactgctccgatcccgcccacaagctggccaagcgcatcgatgtcatcgagaacaacgagcccggcgccatcgacctgacggagaacgatctggtgttcatcaccaacggcggctgcgtggagaactcctccatgggcagtcaggataagcccgccgcctacaacaccgagctgaagcccggcggcggctgggatatgtggcgcaagatcgccgcgcaggaccctgcctttggccatcccgacaagttctgccatgaccccgagcagaccaactggatgagcgccaccgtggagactttggaccagaagatcatcccctatatcaagaacatctgcaagcgcgaccccttcaccggccatgtggtcaccggcggcatcgtcaccgtcaaggactcctcctggctgatgagctggaccatcaaccgccagccccagttccgcgaccagcccaaggaccactgcctggtgtgggtatactccctgttcaccgacaagcccggcgactatgtgaaaaagcccatgcgggcgtgcaccggcaaggagatctgcatggagtggctgtaccacatcggcgtgcccgaggatcagatcgaggatctggcgtccaacagcgccaacaccgtacccgtgatgatgccctatatcgatgcgttcttcatgccccgcgcctacggcgaccggcccaatgtggtgcccgacggcagcgtgaacttcgccttcctcggtcagtttgccgagacgccccgcgacaccatcttcaccaccgagtattccatgcgaaccggcatggaggccgtctacaccctgctgaacgtggaccgcggcgtgcccgaggtctggggcagcgtctatgacgtccgcgacctgctgaacgccaccgtaaagctgcgggacggcaagaaggccaccgacatggagctgggcctgatggaaaagctggccgtcaagaaagccctcagtaagatcgaaaacaccgatatcgaaaagctcctgaaggaataccacgtcatctgacagcccccagttcaccccccaaacaataaatatcccccggcctagccgggggatatttattgcgttcagttatactcccgcaccacggcggtgaccttgcccagcagcgtggcctcgcggccgtcgatgggccggtagttctcgttctccggcagcagccacacctcgccgttccggcggctcagccgcttcaccgtggcctcgtcccccagcagcgccaccacgatctcgccgttgtgtgccgtgggctggcggtgcaccaccaccaggtcgtccggcaggatgcccgcgttcagcatggactcgccccgcacccgcagggcaaagtactccccctcgcgtccgccggtgtcgaaggtcagatagtcctcaatgcactcctccgccaatatggggctgcccgcggccacgctgcccaccacggggatgcggtccgccgccggcgccgcctcctcctgtaccggcgcgccgtcaggcatttccccctgcatgggctgcgccagcgtcagggcccggcccttgccggcccccttggtcagcacgcccagctcctccatatgcttcaggtggaaatgcaccgtggacggcgatttcagtcccaccgcctcgccgatctcccgcaccgaggggggatacccctgctcccgcagtgcctgggcgatgtagtcgtagatcttctgctgcattctggtcatcttcgccatagccatgcccctttcatgcgccccgtgtcggcgcaggtccgttttttgtatgtgcgccgcgtccgctgttcttccggctctattatatcacacactttcgcgcattgcaacatttgttctatttctttttgcagttttttctgaggctgcagcaaagacgaccgtgaagtaacatcaaaagcaatgaaagaaatcccgtttcaacgggcatttcactcttgacaagggccgacggtatatagtataatgattttcgctgacacggtgacatagccaagtggtaaggcaagggtctgcaaaaccctcattccccggttcaaatccgggtgtcacctccaaattagacaaaagctgtgtataacgtaagttatacacagcttttgcttttttagcatgtaaatcgcataaactcggcccgaaaactatgcagaataacggcaaaagagaaaatgaaataatctgtattcctatgttttatctcttgaacgaggtaacacatgggaagttttgtttttaggaggaataaaacatgagaataccatatggttttgtgttgatcagcggagggacacttagagtcaacgagtatgaagcaaatatcgtatccatgattttcgagttctatatggcaggagcaagtttgggaaaagtggtggatatgctttactcaaaacaaatatcttctccgaccggaaagacgaaatggacccgcgctgcggtagatcaccttctttcaaacggcaaatatgtggctattgtcggcctggagaaatttctggatgtccaatttgagaaggctgcccgctgtaatattgactacgacaaggagggttcaccgaggaaagacatacgttatgtttcccctgctatggttcagatttaatttgtcttttacaacactgaaagttatgctacaatgaccttgagaggtgatgtgtgtggcaaagaaattgaatctggtggatatgtacggaattggacttatgctggaacaccttgtagctgagggcaacattacctgcgaggaacgggatcgagttatattgcgaatcgcgcgggaaaacgatattgccgaatatatgctctcgaatcttgccggttatggaagaagtaagcaagaggtgttggaacgagcaaaacggaggaaaggcctggaatcacaggggaaaaagcaggaggaaggttacatttctctgactgaggtcgcccgagctcacagcgaggatgctccgggatatgtgatacagagttggctgaggagcggaaatactttagcatttttgaatctgtgggagcaggagaataatccgaattatagtgagactggttatgcagaacttttaaagagaaagaaaactgcctcatttacgttgacgccaaagctatggatcgaccagacaaaggcaatcggcatcgtttccaagcaggagaaaaacggaggaacatttgctcatccgatgatcgcctgcgagtttgcctcatggatcgccccggaatttaagatgcagttgctgaagctgtcgctggatagaacgaaattgagatgaatgaaccttgtgttggtaaggtggggtgatgaaactatggaaaaaattctgatcgtggggaacggattaacagctaaccttattcctgaatatcaacacaaagctatgatgaagaaaatcaaagaggaaattccgcgcctctttgataaggcggataaattgtttgcgcctttccgcaataaagtagacagcgttcaatatagtgctgtatcgtggggatattctggcgatggtttttgcggcgaagaagggtacggcggaccaatcacagatagaccatataatccaacactactttcgcatattgaggaccagcttcgaaaacttggctttaatgatgctcagacagtttccaccatcctcttccaaacatatggacttatatatgaaacacaaaatgatgaaatatccaatgtggagagcctcttaaaaataattgagcttttttgtcaaagaggggatttcacgaaagaagatcaagccgaattaaagcgggcagcaagtagaatttgttataataatggtaagtggggaaaagacacgttaggcaaagcaaaagtagagcaattaaagagatggctgtctgattacaaaatgattttcacaacaaattatgattgcgttttagatgatgtccttcaaacagatgaaataaagcatctgcatggaggcttcttttacaaaaaacaagatagacagaagcgctctgacactctattaggcccagatgatgcctgtttgatttggggaattagcggagaagaaaaggaagaagaaatgaagcttggcggaggatttacatttccaattcaattcccactcgaatcccctatgacaatttttcagatttacttatctcaactccaaaatgcaaatgctggacgcattgatatttttggatatagcggggaaaacgatcagcatattaacagagcgattgcccaaaatccatccatccgggaaatccactattactgtgcgcctgcaaaagtttcagatcctgttgaagaatttgaagttgcatcacgattttcaattaaggcaccccagaaactgatgctggaatcatggaatacaatctggaacatcttcgagcagaattaataaaaaattggagttgatgtcccctggctatgttataccgagaatgtcccccgtaaacatataagtcgatgagattgaggtgaaaacaagtgagccagaacgacaagattcaattatttgaggacaagcgtatccgcacggcgtgggacgaggaaaaggaagaatggtacttttccgttgtcgatgttgttgcggttttgacagatcagccagatgcccgtcatgccagtacatattgggcagtattaaagaagcggctgaataatgagggcgcaggccaactgcttacaaattgtaagcagttgaaaatgaccgcctcggatggacgaaaacgcatgactgatgtggctgacacagagcagcttctccgtatcatccagtccattccctcaccaaaggctgaaccattccggcaatggctggcgcaggttggtcgggagcgcattgaggaaaccatagacccggagttgaccatcgagcgggcgttggaaacctatctcaagaagggctatacccgcgagtggatcaaccagcggctgcaagccattcaggtccgtaaggaactgacagacgaatgggatgcccgcggtgtgcagaagggcgtggagtacgccatcctcaccgatgagatctcccgcgcatggtcggggatgtccacccggcagtacaaaaatctgaagggcttgaaaaaggaaaaccttcgtgataacatgaccacgctggagttggtgctgaatatgctggcggaagccaccaccacacagttttcaaaggatcgaaagcccacgaccttccaagagaatctggaagttgctaaagctggcggacaggttgccgggcgaacaaggaaagacattgagtcacagtccaatacgccggtcatctcctcaaagaacgccgcgcaacttaatcaggtcgtgactgaccttttggaaggggcagccgcggatatgagcgagatgccagagaaaaaatgagtgtttcgcataacggtttttcatgcgaccaattggcagttcttgaaagcacccatcaaaaaagtttgagaaaagttaaaaaagaactaagaattccaatttgcacatggcatttttgagccgggggttcaaaaatctacagtggtatagcatgacaaccaaaactcccgaaacgcctgtgtttcgggagttttttcatgcccaaaaacaggttttagccttgtttttagtcttatgcggagcgccctgctcgttgaaaccgttgaaaaaggagggggacggaagcttccgtccccctcctgcggtattggttctattctatgcagacaattcgtccgtccgtgtcgtttagcccagctttgcccacgtcagggggccgacgataccgtccacacccagaccgttggccttctggaacgccagcacggcggcctttgtcttgcttccgaagatgccgtccacgctgccgcagtcaaatcttcacgcttcagaattggcgcgacggtcttgacaccgtcgcgcttacgctgccgtatgcggacaccggcaagcacgcctatacgccggactggtcgaagcttcccagcgggcagacttgaaactacagcagctcgcccaacgtcagtgaaggctcgaacgcaaagcttactacattctgctggcagaaagacgctggtggacgcggaactgccgccctacgcggtaacggcgctgataagctacaccggcaccgcggcgctgctgcgccgccgcaagcgtgaggcctgacgaggcaccgcagaaaacaggaaacaccacccaatgggtggtgtttttttcggcggaacaggcacgcatcccccaggcaggaccgcctgggggtgtgttttattgctttcgcgcggtgatatagtcgtcgccggggcgccaatagggacaggatcgggtatcggcggccaggaaacgggccagctcgtcctcgtccagatccatgtcacagatataatcgtcatagtcctcgtcatagacgtaccacacgcaggtctcacacttgtccatcatacgtcctccaccagccggtggctgtcgaatttgcagaagcggtagtagatgagcgtggccacgctgcacacgaaccagccggcggggtagctcatggcgatggggatgatctcgttggagacatagttggccacgatgtagaggtatatctggcggaagaccacgaaggagcccagcatgatccacatgggcacctggctgttgcccgcgccgcggagggcggcggagtagatctggttgatgcagaagaagaaatagaagggtgacagcagccgcagcagcaacgcgccataggacaccacctcggccttgctgttgaagaacgccgtcaggtccggggccagcagcagcaccggcaccagcagcaccgccgtcaccacgaaggacaggtacagcgccgtgcggacgcccttcttggcccgggccgtgtcgcccacgcccaggttctggcccacaaaggtggtgccggccatggcgatggactggaccggcaggatcaccaactggtccaccttggtataggccgtccagccggacatacaatccgggccgaaatagttgatatagccctggacgaacacgttggagaaagcggtgatggccatttgcagggcggcgggtatacccacggacacgatctgacggaggacggaccaggtcatacgcagggcgcggagctccacgcggatacagccggcggcgcgcatgagtacccagatggtcagtgcggcggacaccgcctgagcgatgatggtggcgtaggccacgccctccacgcccatgccgaatttcagcacgaagagcaggtccaatcccgtgttcagcacggcggacaccagcaggaagtagaaggggcggcgtgaatcgcccacggcgcggaggatgccggagcccatgttgtagagcagcagtcccatgacgccggcgaagtagatggtcaggtaggtggtctgctccggtgccacctcggcgggggtcttcatcaggcggagcatcaggggcgtcatggcgatgccggcggcggtgaagaccgcgcccatcagcagcgtcagcaccagggaagtgtggaccgcctggcggaccttatcctcgcggccggcgccgtaatactggctgatgaccacgccggcgccgctggacaatcccaggaaaaagccgataagcgtgttgataataggggtgacggtacccacggcggaaaaggcctcgttgctgacgtagttgcccaccacccaggtatccaccatgttgtagagctgctgaaaaagattgcccaccatcagcggcagggcaaagttgatcagatgctttgtgatgctgcccttggtcatgtccacgtcataacgggcggcgcggtggtgggtgtggaaatgcagatgcagatggctggaatggcgcatggaggctctccttataacatacttctttacaggaattttaccataataccagccggggcgcaacagggagaatgccggtttttcggcgcggacagcgccgcagaatgggcgggaatggacggaggaagcgcgtcattccgggaattccgtccgctccgccggacgcatgatggatacctcgtaggcagtgcggtcggtggtgacgccgttctccgttttggagtagacacggctctggacccgaccctcggcggtgagccgggcaccggtgtgcagcagggacacctgctgggccacggcgccccaggcgatgcagggcaggtagtcggcgcggccgtagcggcggttcaccgccaggatcatgtcgcatatctcgcggccaaggggcgtacggcggagggcgggctgcttgcacagcacgccgctgaggaaaatgcggttcagcggttcgccggcgtcatgggtcagcgtctgggcgaaggtggagatgaccagacggctgccctggccgcttttgttgttgaaggaacgcagctggccggtgatatgtacgccgtcgccgggagacaccggcgtcagcagcagaagcggccgggggacgatgacgggcagcttgtccgcctgaccggacaggcgcaggacggacagggtaaagcggtagaacgcacagccgtggttcacatgggacagcaccggcgcgtcctcggccacgccccgcagctccacgcggttgtaattcagctccatagcacacctcgtttgttgagatgtcacagcctatgtggggcggggctggaatatgcccccttttcaaagcgttcaaagtatggcataatacagcaaaaggagtgatgaccatgcgttataagggaaaggtataccgaccgcccagcgaggcgtacagcctgatcgtgcaggtgacctacgggtgcagccacaacaggtgcgccttctgtgatatgtacgacgacaagcactttgccatgcggcccatggacgagatccgggcggacttcgagctggcacggcgggtataccgccgggtggagcgtgtctttctggcggatggggacgcactgatgcggaggaccggcgacctggtggagatattggggctggtctatgggctgtttccggagtgccagcgggtaacatgctacgcctcccccaccagcctacagatcaaatccgaggacgagctgcgcctgctgcggagcaagggcctgcagatggtgtatatgggattggagtccgggtgcgacgcggtgctggagaagatgcagaagggccacacggcggcggagatcgtggcggcggggcagaaggcccggcggtgcgggctggcgctgtcggtgacggccatctccgggctggggagcgtggcacactggcgggagcacgccgcggacacggccagagccgtcagcgaaatgaagccggactatctggggctgctgacgctgatggtggagccgggaacgccgctggaggcctgggtgcgggagggcagctttacgctgctcagccccctggaggtactgaaggaaacagagctgtttttacagcacgtggacagcgaaggaaccgtgttccgcgccaaccacgccagcaactatctgacgctgaagggcacactgaacggtgaccgggaggcgctgctggcgcagatcgccgcggcgctggacggtcgccgggacctgaagccggagtttttgcgggcgctgtaatgcacacgcgcattcaaaagggtttccctgtgggaaacccttttgctgtccaaccagccccgcgctctgcggaaaagggcggacttgacagggtgggtggttttgtatataataggcaagatttatatcaaaaggaggatacagggcgatatggataccgacagcggcgaccatcccgggaacttgccgggctgccatctgttttttgcggcatatctgcgccgcctgacgcggggcagacgtgcttttttgcgcctttagaccagtgtggatcgcagaaacagatgacagaaaaaggagctattgatcgtgtcaacgactacatatatcattattatggcggtatgcctgctgctgtccgcctatttctcggccacggagacggcgttctcctcggccaatgtcacgcggctgaaaatgctggcggaaaaaggcaacagccgtgccgcgctggcgtgccggctgctggagcgctatgacaagctgctgtccaccatcctgatcggcaacaacatcgtgaacattgccatggcatccctggccacggcactgttcgtcaaaagcttcggcgatgccggtgctacgctgtccaccatcgtggtaacggtggtggtgctgatcttcggcgagatctcccccaagagcatcgccaaggactgcgccgagagctgggctatgacggctgcgccgtttctgcggtgcctgatctggctgctgatgccgctgaacgcgctgttctccctgtggaaaaagctgctggccaggatgttccatctggatggggacaacaaaatgtccccggaggagctgctgatgctggtgaacgaggtgcagcaggagggcagcatcgacaaggacgagggcgacctgctgaagaacgccatcggcttttccgagcaggaggcgcaggacatcctcatccatcgggtggacctggcggcactgccggtggacgccacgaaggaagaggtggcggacctgttcacccagacaaagtattcccggctgctgatctatcgggaggacatcgaccatattatcggcaccatacaccagaaggacttttatgtgggctgcggcgtaacggacaagccgctggaggagatactctccccggtcatgttcgtgctggaaaacgagcccatcagtctgctgctgaaaaaattgcagctggccaagacccaggtggccgtggtggtggacgagtacggcggcacctgcggcatcgtgaccatggaggacattctggaggagctggtgggcgaaatctgggacgagcacgatgaggaggaggtctttatccgcaaggtggacaaggacacctatctggtggacgcggccatggattttgacgattttgccgagttcttccatctgaatgaggagacggagatgacgtccgtcagcggctgggtgatggagcagtgcgaccgggttcctgaggtaggcgaccggttcagctgccaggatctggacgtgctggtgacgcgggtggacaatcaccgcacttgtgagatcaaggtggtccggcgggaagcgtccggcggtgagatcaccgacgagatataagcagaagcacccggaggcataagcctccgggtgcttattttttcctgtgaggaacctctcctaaggtgagtccaatactaccataccaccatccgcccgccaatgcaagaagaactttcgcttctgcaacaatttctccctaattctatatattatatgataattccgatgaaatatctgcgttttgcaccgttgacagcggaggtatgggggtgtaccatcggagcatattttttacaggggagatggcgggatgaagtatatttttgtgaccggcggcgtggtgtccgggctgggaaagggcatctgcgcggcatcgctgggccggctgctgaagcagtgcggtctgcgggtgcgaaaccagaagttcgatccgtacctgaatgtagacccggggaccatgagcccttaccagcacggcgaggtgttcgtcaccgacgacggcgcggagacggatctggacctggggcactatgagcgcttcgtggatgaggcgctgaccggcgacagctccgtttcctccggaaagatcttctggtcggtgctgaaccgggaacggcagggcggctatctgggcggcacggtgcagatcatcccccatgtgaccgacgagatcaagcggcggttgtacgccatggatgacggacagacggacgtggtcatcgcggagatcggcggcacggtgggtgacatcgagagccagccgtatctggaggccatccgtcaggtggcggcggagcaggggcgggaaaacgtgctgtatatccacgtgccgctggtggtctccatccccggcagcggcgagctgaagagcaagcccacacagcactccgtgaaggagctgctgagcgtgggaatccagccggatatcctggtgtgccgcaccgacagcccgctgccggaggacatgcggaagaagatcgcactgttctgcaacgtcagtgaggactgcgtcatccccaacctgacggcgtccaccctgtatgaggtgcccctgctgctggagcgggaggggctgtgccgggtggtgtgccgcaagctgggactgggcgccggcgagccggatatgcggcactggcgggagctggtggcgcagatacacgcggcggagcagcgccatgtgaccatcgcgctggtgggcaaatacacggagctgcacgacgcctatctcagcgtggcggagtcgctgttccacgcggggaccgcctgcggcgcacaggtggacatccagtgggtggactcacagcacctgacggcggaaaacctcacggaaacgctctgcgggtgcagcggcatattggtgcccggcggcttcggtgaccggggcattgaggggatgatcctggcggcgcagtacgcgcgggagaagggtatcccctatctgggcatctgcctggggatgcagatcgcggtcatcgaatttgcgcggcacgcagccgggtgggcggatgcccacagcgcagagttcagcgccgtgacggcacatccggtcatcgacctgatgccggaccaggtgggcgtgaccgccaagggcggcaccatgcggcttggcaagtatccctgcgtgctggcggaggggacaaaggcccgggaggcctacggccagcgggagatatgggaacgccaccgccaccggtatgagtgcagcaacgtgttccgaccggagctggaagccgtgggcctgcgggtggcgggtacgtcgccggatggccgtttggtcgagatggtggagatagcggaccatccgtggttcgtgggctgccagttccacccggagttcaagagccggccggaccggccccaccccctgttccgcggctttgtggccgcagcactggcgcagcaataaggaggcacaaaaaggcccgcccctgcggggcgggcctttgcgctcagcgcatcagggctgcatggccgcggcggtggccgggtcaaggtaatactccccatcgccgccccggtagtagatattctggataaagccgtggaggtcgtactccaccttcgtgtttggctcggccagcacatcgccgtacatcagcacgggatcgatatcctcccggctgttgatctcctcctcggtcagatcaccgcccttttcaacggtgcggttcaagttggcgtcgtagtagaccacggagtagtcctgcatccacatgggaacatagaccacctttgtgacggtctgcccgtcctcctcgggctgggagattccctccaccggcggtacgtcatcctcatcggtgggcagggtctggacgccgcaggcggccagcaccgtaagcagggccagcagcgccgcgatcacagcatactttttcatattcattcgctcctttcgcttcgatacacgctctccgccatagacagcagttcgctctgtgtctcgccgccggtgagcaggaagaagcagttggcctgctcatccacccataccagcgccgatgcgcctgccggtacagccacatagtggaacggcgccatgtcctccccacggtagaaccacaggccatagccgcggcgtgccggggaagcgctctgccccgcaggggcgaagcgatacagctgcgcggagataccgtgcactgtcaccggcgccgcatcataaccctccggcattccttcttcccccataggacgctgccccgtctcggtattgtatatcccaccggtgcttccgtcccggagttccgcgcggatctgtgcactgccggtcaggggcacggcttcaaacagtatatccccctgcgcggaggtccagcgcatcacccggacaccattcctcttttcatcgttatagcctccggtaaagtcacctgtcagcgtataacccgccggggccgcgggcgtatagtcttccggtgtcggctcctccgctgacggcgtaatgtcgtaaagcgtggtcacgctggtcactcgcaggaaccagcggctgaccgccgcgcgggcggtgggactggccgccagcaccgcgccgaaggtcagcagtgccgtcagagcggccgccgccgcgcgtcggccccatcgtcggaccgcctgccggcgggtcacacagcgcgtcagcgccgtcatgtccgcctgaaaggccggggaaaatccatcctccggcgccggcagtgccgccgccagctgcaccgccagtcggcgcgcgccgcagcacagcgcttcatcattgagcagaatgctcatacagatatgccctccttttccagttctgtacgcagggcggccttggcccgctgcagaagcttctgggccgcggcaaaggacagacccagcagggatgccgtctcacgggtgctgtagccgcagccgtagcgcagcagcagcgcctcgcggcagcggggcggcaagcgccccatagcgtcggccaccgggtcgccgcagggcggcggcgtgaccagaacggtgttctcgtcaaagggcacgccgtcacggcgggcctgctgccgcaggcagtcgatacacttacgctccgtgaccaccaccagatacgcctccagccgggggcgaggcaggcggcacagccgcggaaagtgctccgccagcgccagaaacgcctggtgcactgcgtcctcggcctccgcgccgccgcagagcttccggcgggccagggccagcagacggccccggcaggcagtgtatatgtcctcgaactgccgggtctgccggggatcctctatggtctgggtatagagcagcataggccctcctcccttctgcgctgcagctgtgtgcggacggcagtgtgtctccgtcctgcgtcttcactctgtaaacggcgcagcggagcaaatgcggacagtaaaaccgaaaattttttcaaaaaacgcgtttccctatggaaaaaggacgccggggcgtccttttcgggtaagactgttcatacatatacagaaggcgatgccggctacaccatgacgaacatattataatgcttcatcaggcggatatcctccttggatatcttcagctcctggaccagcgccttgtcgatggaaagcggtgttttgctgagaaggcgcttggcggcggagggcatcagcggtcggcaggagatgccataggtcagcacccacttccggtcgtcgtccatatagggctggggaatgccgatctggtatttgtccatgggcatatcgtcattctggaacagcatggcgctgaacgcctcgtagtgggtcagggtgccgtggtaggtgctctcacagacccggtagtgggccaggtccttgatgttcatgtacatgagcacctcggccgtgctgctctcctccgtggggaatatatcgatcacggtgcactgggcgcggttgacccggccgtcgaagaagtacatatataattgggagacctcccggaaaaaggcgggcacctccgcgttgtactcctggtcaatatccggtgtattgcggtacagcagatcatagatgctgaccttcagggcgttggcgatgtcgtaaagcgtggcaatatccacggagatctgtccgttctcgtacttggagatggccgaacgggtcttgtagatggcctgagccagctcgtccatcgacataccccggcttttgcgggcgtagcggatgcggctgccgacttctcttgtgatattctctcttgcagtgtccataggtgatttcctcaaaatcaattcaggctcattttttcactggtttttaacgattatagcaaaatacgtcaaatatgtcaacaaacgttccgctcaggaaacataatttgcacaaattgttccgcagggggaacaggcggcaaattgccacccggtccattttccgttataatggcaactaaggtaaaccttacgtacgcaaaactgtacaaaatcacaataatactacgttgaaattggagaggtgtacaaaatgaaggtcaaagctgatacgttgttttatggcggcaagatctacacgatggaagcgccgggcgtctgcaaggaagcagtggtgctgaaggacggcaaatttgcctatgtgggcacaaaggaagaggcgctggagcactttgactgcgcaaagtgcattaatctgcagggcaaaactgtgcttcccggcatgggcgactcccacctgcacttcttcgctttctgccagacttataccacggtggacctgggtggcgccacctcccgcgccgaggcgctgcagctgctgcgtgaccgcgcggcagagacacccaagggcgagtggatcaagggctccaactttgaccagtccaagtggaaggactgcgaggaccggctgcccacccgtctggacctggacgaggccagcaccgatcaccccatcgtcatcaagcgtgtgtgcctgcacacggcggtagccaacaccatggcgctggagaaggccaacattaccaacggctacgtgtacggccccggcggcctggtggagctggacgctgacggcaatcccaacggcattttccgtgagcaggcctccaagatctacgacaatctgatccccgacccgttcctggtgcccgccacccgtgagaagtgcatgaagaagggtctggcgctggcttccagcctgggcgtgaccatgatgcacacctacgccgcggagatctggcactatgacgaggacttcgccgactatgtggcccgcagcgaccgcggcgagctgccggtgcgtatggccgtgtgcctggactatatgttcgacccggaaaacctgacacccgagcagcggaatgatccctatcgtgccgcacggatgggcagcttcaagagcttctctgatggctccctgggctcccgttccgccaagctgtacaccgactacgcggacgatcccggcaacaccggcattctggtcatcagccccgaggatctggccaagagaatgtacaaggcataccgccacggcttgcagcccgccacccactgcatcggtgacaaggcgctggaggtcactctggacgcggtggagtactgccttgagcaggggctgaaggacggcatgacgccggaggagcaggccaagcgtctccccttccgcatcatccacgcccagatggccacgccggagctgatcgagcgcatgaagaagctgccgatcgtgctggatatccagcccacgttcctgatgaccgacctgcactggatcgaggagcgcgtaggcaaggaacgcgccgtgctgagttatccctggaagacgtatctggacgcgggactgatcatggccggcggctccgacgcaccggtggagagcttcaatccctggatcggcatctatgccaccgtgacccgtcaggatatggacggctatcccgtgggcggctatcaccccaacgagaaggtatccgtgtatgacgcggtgtgtatgtacagcaagaacgtggcctacgccaacggcgatcaggacctgatgggaaccatcgaggccggcaagttcgccgacatggtggtcatcgaccgcgacatcttccacattcctgaaaacgacatcaaggacatccaggtgctgaacacctatatggccggcatcgagagatatcaccgcgactgatacgcgcagcataacaaaggagctaagacatgaaattaaattcttttgacaaggtcaagcagttgacggaagagatggtcgccatccccagcatcaacaaggagccgggcggcgagagcgccgtggcccgctatatacaggacttctatatgtccctgccctacttccaggcacatcccgagcaggtcaagtgcttccagaccaagaacgactttgtggtgcggcacagcacgctggcctatgtgaagggcaccaagggcaattccaaccgcacggtcatcctcatcggccacatcgacaccgtgggcgtggacgatttcggcaccatccgcgagtacgctttccgctgcgaggagctgcccgccaagctgcgcgagacgttcgtgctgccccaggaggtcattgacgatatcgagtccggcgagtatctgttcggccgcggcgcgctggatatgaagtccggtgtggcaggccatatgtacctgatccagtacttctctgagcatcccgaggagctggacggcaacctgctggctatcggcgagtgcgacgaggaggacaactccaagggcatcatcaccgccctggacctgctggaggagctgaaggagaaagagcacttcgagtatgtggcgtgcatcaacgcggactactccaccaactacgctcccggcgacgagaaccgctacatctactacggcagcatcggcaagctgctgccctgcttcgccgtgttcggcaaggaggcccatgtggggcaggccttcagcgcgctggaccccaacctggtgctggccaacatcacgcggaagatgtccctgaacactgacttgtgcgacatcgcccagggtgaggtcgccattccgcccatctccctgaagcagatggacaccaagggcccctacaccgtgcagacggcgctgacggccttcggttactacaacttcttcacccacggctggagtccttccatcgtgctggaaaagagcaagcagatggctgtggaggcctttgacgagacggtggagtacctaaatgcccagtacaagcgcttctgcgagctgagcaaggtggacttccatcagctgccctggaagacccgtgtctacacctggaacgagttctataacgagctggccgccgtgcacggcgaggccttcaagaaagccattcacgagttcaccgtgaagctgcatgaggacgatcctgagctggatctgcggctgttcggcctgcgtgtggtgcaggaggcatggaagtggtctgaggacaagtcccccgccgtggtggtgttcttcggctccatcttcagtgcccgtatcgagatgaccggccgcacggccaaggaaaaggctctgctggacgcggtggagagcgccatcgaggtggtgcggcccgaggcccagcgccagatcaagacccgtatgttctacccctacatctccgactccagctttatggccgtgtgcgacgacaccctggctatccaggcgctggagacgaacatgccccagtacggcgtgaaatacacgcacccggtggataagatccgtcagatcgacgtccccgttgtcaatatcggtaccttcggccgcgacggacatatgctcaccgagcgcgtggatatgcggcagacgttccaaaatgttcccaacatcacctatgaagcggtgaagcatctgctgagctgagttatcccccctacgctgagagaccctgtcaaaacgcacaaaacgcaccaagcacaaaacgcaaaacgcacaagcgcaaacacagagaaaatcacctattgtttcgcgtgaaaggagaaaagtatggttatactgcaagctattcaagattttggtaactggttctggggcattcccattttgatcctcatcggcggcggcggtctgttcctgaccatctatctgggcttcccccagatccgccacttcggctacgccatgagccagaccttcggcaagatgttcgccaagaaggaagagggcaaggtccgtcccatctccgccgcattcgcggccctggcctgcgccgtcggcgcttccaacatcgtcggcgtgcccgtggctatcgccctgggcggccccggcgctgtgttctggatctggatcctggctatcctcggcatgtgcaccaagtactgcgaggtcgcgatgggcatcaagtaccgtcgtaagaacgacgtgggcgagtgggtcggtggccccgcctactacctgcgcggtctgggcaagaagatcggcgtcgtgttcggcgtcggctacgccttcttcttcatgatcgagctggtcccctccctggcctctcagggcgtttccgctgctgagcagttcaacgtcttcggcgcaaaccagaccgtcaccggcatcatcatcgccgttctggtgggcgttatcctggccggcggcttcaagcgcgtgtccagcgtcaccgacatcctggtgcccgtgatggcctgcctgtacgtgctgggcgctctgatcatcatcttcgccaacgtgggcgagatccccgctgttttcggcatgatcttccaggatgccttcaccggccgcgccgctgtgggcggcttcgccggcgccaccatcatggctgctatccgttggggcgctgcccgcggcgtgtactccaatgaggcgggcgtaggctccaccatcgccggtcactgcaccgccgatacggatcaccccatccgtcaggcccagttcggtatctttgaagtcttcatggataccatcgttatctgcaccatcaccgccctggctgttctggcctccggcgtgtggacccaggagggtctgagctccggccagctggccctggctgctttccagtccgtgttcggcagcttcggtgctatcttcgtcgccattacggtgttcctgttcgtgttctccacgatcatttccgccggcttcttcggccagatccaggctgagatcctgttcggccgtaagttctccaagatctgggtgtttatgtatcccctgttcatcggcatcgcctgcgcgttctccaacgtgaccaccatgtacatgatcaccgacggcttcatggctattatcgtcattctgaacatgatcggcctgctgctgatgtgcaagcaggtgaaggacctgcagaaggagtactacaacactcccggtatgtactacctggctgacaaggccgccaaggaagccaagaaggctgccaagtaacggctgacacagcataacacagtgataacgtaattcccctgtactgacattccccgcgttttgtgcgtttaccccccctggacctctcagcgaagggtgctggtcccctccagcgccggggcccggtccgaccttgtgccgggccgggcttccggtatttcagggggcctgtcccaccccacgataaaagggaacgaccgccgaatgggcggtcgttcccttttgtgcggcgggtgcttgtttaaccaaaggtgcctttttatacacatcactatccggcggatcgcaccgttattcctctgcgggcagcgtcacggtaaatgtggagccatttccaaggcgggagaacaccgtcaccctcccgccgcacagcgttaccacccggcggacaatggagaggcccaggccgttgccccggtcatccgggtatggcgcagcccggtagaacctgtcgaaaatgtgccgctgtgtctcctcgtccataccgatacccgtatcggagacagacacggtgacctctccctcaccccgccgcagcaccacggtgatctgcccgccggcgggcgtgaaccggatagcgttggaaagcaggttagaccagatgtgctccaccagctcctcattgccgtaatagtccaccggatccaggtctccctccacggtcaggctctttttcagccactccctctcctgctggcgcacacaccggcggagctgttcatccaggctgtacagcgtcttgtcggacacgatctcggtgttttcgtaccgggccagctccagaacgtgggtgctcatggcagccagccgttcggactgctgcaccacggtgtctgtataggtccgccgctgctccggtgtcaggtcgtcgttttgcagcagcttggcaaatccccggatggagataagcggcgttttgaactcgtgggaaaaggtattcacaaagtccattcgcagcagcgccacgctggacagttcctccgccattttattaaagctgcggatatattccgccacctcgccccgggcgccccgcatatccacccgcacggtataatcgccctccgccaccgactgcgtggcctgcatcaaccgtgacagcggcgccagatacccacggaaaatgaatatggccagcagtacgcccaggatggcgctgaccgaaaggatgaggataggccacagcagcgtatagctggcgtcctccagatgcaccagccgctgcaccagtgtaaatatccccaacgccatccccacatacaccgccaccagccccagcaccagcaggaacatggtgcccagcagccggacaggcggcttttcttttttcaccttatttctggccattgccgtcctcccggggcatccccatatagccaaatccccgaatcgtccgcagctcgaaatccgggttgtcccggaatttctctcgcagtcgggagatgtaaacctccacagtgtgctcgtccacatcactgtccagatcccatatgtcgtcgataagctgccgttttgtgaaaagcgtccgggggtaagacagcagcttatacagcagcaaaaactccttagcggacagctgccacgtactctgcggagtgatgacctgcagggagccgcggtccagcaccgtggtgcccaccgtcaagcgtcggtctgcccggctgcaataccgccgcagcagggcctcgatacgccaaagcatctcctcctcgtccactggcttgaccatatagtcatccgtccccgcccggaacccccggcgcttgtcctcctgggtcacgcgggccgtcaccatcagcaccggcagatcgcagttcccctcccgcagcgtctgggtgaaggtaatgccatccatccgcggcatagtgatatccaccaccgccagatcgcactggtagtgttccatcacctccagcgcctccacaccgtcccgcgcagggcacggctcgtacccggcacgccgcagcacctcgcacatcagaaatctggcgttgtcatcgtcctcggccaccaaaatgcggaacatggctgtccctcccttgtgtttttttggattttatcacacctgttctcaaaaatcgagattttttgagcttacgttgaggtttcttcggtatactgccgttaccataggaaaaataggaggaacaccccatgcccagacctgtctgcatcacctacgacagcacctgtgacctgacgccccagctgctggagcgcttccatatccgcaccatacccctgactatccagagtggcgggcgtgtcttccctgatgacggaaactacacctcggcggagctgtacaccgattaccgccggaacggcaccctgcccaaaacaacagcgatcagtccagaggcgttcaaggcatttttctccccgcttttagcggagggctatgacatcgtccacatcgacatcagctcggagctgtcctgcacctgccagaacgcggtactggcggcacaggagctgacggaccagggacagatccacgtggtggacagccgccagctctccaccggcggcgggctgctggcactacagggggccaagctacgggacagcggtatggcggcggcggacatcgccgcggagctgcgccgcctggcaccctgcagcgacaccagcttcgtactggacacgctggagtttatgtggaagggcggccgctgcagcggtgtgacggcgctgggcgccaatatgctgaagctgaagccctgccttgaaatgcgggagggcaagctggcagtctgcaaaaagtaccgcggcgccatggaaaaggtgtaccgccagtatgtcgccgaacggctggcggataagacagttgtggctgatcacgctttcatcacccactccggcgaggtggcggagaccaccctacaggagctgacgaagctggtacgggagttggcaccctttcaggaggtattcgtcacccaggctggctgtactgtgtcctcacactgcggccccggcaccctgggtgtgctgttcctgcggcaaccggagcaataacaagctgcgcatcagttgtgcacccatgtccgcaccaggtcgggcacccatccgaacacacggcggcactctgccctgcattcttgttcggtacagtctggatgcgcggccatataggccagcaggtacgcccgtacattctctcgaaggtttttccgggcaaaccggaaatcatacttgggaattgcgtccagcgcaaatgaggtcagcggggcgtcgctgtaacagggtttggtcaagttcacacgggtcgtgtggcagatggtgtgacgggcgtccgcagggcggagtatgtcctccagatgctcgaagtccgctttcgttttgccggtgctcaacagcacgcgcggaagctgcgtctgtgtcagaaagtgcccgttggcgagagtagccttcagcagaaaggacaggcagaaatcctccgaatttgataagcaaatatccacaccgccgtagcctcgctcatggaaatacagctgtccaaaccggtttttttgcttgcggctgcgatgggtattgtagtcgggaaaatgcgtttcgtcatagcaataggcctctacccatagcggctcaatggtcacgccaaagacctcgatgcggcaatcattgataagcttatcgcccagcatttgcagaatatgtaccggttcatcataagcggcattttttaaattgctgaccaaggtccacaagtcggcagcgcggtccatacactcagtcctttccggggcgtttcaaaaagtatatcacttggatggcgttcgtacaagttccataggaagaactttgcgtaagggcacacattcgctacgttagttatgcaaaaagccgtggatgcgtttacggtgtacccatttatgccaagtaagatcccccaatcccctgtgctgcaagggattgggggatcttctcgtgttgatgtgttttaatatgtatcgagaagttttgcgtagatttggggcgtttgttggaaggattgttggaaagtgacttgtgttaaccaaaacgtgacataacaggaaagccattgcctgaaagcacatttccagtgattggtacgtctatttcctcctcgagagcgagtctcggtaatgcaagactaccggccataaatgatactcgtagctcacaacagaaaacatattccatggaaataggtgttctgtcaccacttccatgtcgcgctacgcaggtaagaaaacagggaaaaagattgccgacgaagaaacggcgcagaaaatcatcgccgcactggaaaatgagagcatcaagtatgagacatacttcaagcttatcattgccacggggatgcggcgcggcgagtgctgcgccctgcaatggcgggatatcgaccgagagcagctcaatatccacagcctgcgccacaccgctgccagcctgatgatcgcgggcggtgcggatatggcaacggtagcgggtatcctcggccacagccagctctccgccacgctggatatctatacccacgcaagaacaaaaaagccgccagcgcaggatcgcaagggatgcttgagatatgacgcaggatagctccgtactgagtatcctttgccttccgtatggcaggagtgacggcagttacgggaaaaactgcggggtcacggtaaaaaattcaaggaggaacagtacgcttttgggcttacgccggaagcaaagaaaatgatagaaataaacgcgccactggctaactgcggcagccaaagtgagttcgtagagaaggctgttcggttctacgacggctacctgaaggtgcagaacgccggtgcgttcctgccccacgcagtggctgacgtgctgaagggaacgctgggcgtgttcgcaaaccgcatgtccaagctgctgttcaacctgaccgtggagcacaatatcaccaaccatctgctggccgccgacgtggatatgacacgcgaggaatacaacgagctgcgcggcggcagcgtccgcgaggtcaccagcacacggggtatgccaagaatctgacttggcacttaacaaaccccctcgttgcaaagcgcggcagtccatgttacaataaaaatatctgtgttgcaggtagcacactcgggacaacagcaaccaaatcttcttccgtgtcagatggacacaccctgcactcggtgctgtagggatattcgcccaaggagagcctaactctgatagagacatctgggcaggagaaccaggacaaatttcaattaattgggaaatgttgtaataatcggccatgttaaatcaactatactaatagagcatccacgttggcatatcagtagggaggtgacatatgaaatattcagcctaattgcttgtgttcgtgtgtttacaaaacaagtagtgaaagccttggcggaaaataaatggcttgtttgtatttatccccttttacttccgcgcggtttgtattattataatgaggtgcagaaaagaaatccaatccacagtattctttacaccgcaaggcagtcctttgcggtgggcttaaaactaccgctttatgaatgtgaggggaatcgactaaaaaagagatcgctaggtcatcacgtttctgaaggtaggaagaaacaggtaaggaggttagcaaatggcacacgatggtaaattcgctcaatatatacgcagaaagcatatccactggatggttgctgcagtgctgtgtgcgctggttgcattgcttgtgttgcgcagaattcagatacctgccaatgtcccgctgcctcaagtacccgtcagtgatcctcaacctaaaacgccgtattccattcccatcgagaatacaaaactgtacgtttatgtaagcggagagggagccttagattctgaagaaagcactacctatcccgaggaagctgctgtcgaattagcaaaatcgttcctcgacgacttgatgactccttccgatgctcgaacatttacgattacggagtacagggatctcaaagtgcgcctactgccaacgactgatatggacagagaaagcgcggacatatacgtacttagaccatctgaaatcagtaaagatacttggattgtggaaatagatgtttcctttcaatatgaaggggtcatcagccccatcgggagtgccgatcagcggtggattgacatcctttatcaaggcagtcccattggtttcctactaacacgaaacggaacggagtatacaatgcgttctcgttacagtggtgcataatagcagtgcaatatttttcaagtgatttgtccgtaaccgtcaaaacagagggcggctggacaggcatgggacaatcatgtttcgccaacaatgaaagaatttatagccgcactggagggggcaaacattacaacaaaattggagaatgggaaaattcatttgcggcgagaagtaaaaaggccgtggccatttaagcccgaaacaattaactattcaataggttttgctggctggagtcggagtgtaggcgctaaaacggcgcgggaagtccttcaaaagctgaagctttacgaagagtatccagactatcaagacttccttgaggggaaagaacctatgtaccaaatggtagaacagtttgaggttccacttaggcgattaaaagatgaatgaatacgcatattgtgcattaaaagtagcaaaagccatctgatagattgccgaacttcctttccgctcctttttcgccctttctgcgcatttccgcgtgtgggtcagggtgtgggtcaaagttgacccgccccctgacccacgaatcaaatccaccgaaaagtaaagaaaaagtcctgttttctctcgaaaacaggactttttggagctgctgaccagatttgaactggtgacctcatccttaccaaggatgcgctctacctactgagctacagcagcatatatggcgaccaagaaggggctcgaaccctcgacctccagcgtgacaggctggcgttctaaccaactgaactacttggccatgtgcgctttcgtcttggaactcaagcttgcttattatagcaagtaccgcgcagaatgtcaacacccatttcctgtttttcctgcaattttttcagagggcggcgggtaatcgccgccctctgctctatttacagctcccgggccttgaaccacttcacggacagcgcccagctgccgataaacacagccagcgagatggccatagtcgccagcggagacagcgtggccggcgcgccggactccttggataggtttaccagcagcgcacagacccccgccacgaccatcagcatgacgatatacaccacgcgccccttggtggcgcccagcttgtaggtggtgggcagcatgaccgagggggcgatcagtcccaccggagccatcatcgccagaaacggcatggccgccgcggtatcgtgccgcagcagcaccaccggcaccgccagcaggcagactgccgccgccgtgacaaggcaggtgatgtacttgaccgtcacgatctgccgccgggtcacgggcagcgtatcgcagcaggagaaccagccgctcttttcatcgtcgccgatcagcgacgccggcagcgtcccggcgaagaatatgggatacagcatccacaccgcgcccccgttgctgtccgtggactggtacagggcaagccccagaaaaatcaccagcatcagcaaatacgtcttgccgaagtgccacaggctccgcgcctccttgtaaaacaatcccttcatctcacacctcctttgccatgaacacgaacagatcctcaatattcacctgtcccagcgccatgccggcaggcaccgcatcacgccgcagcagatactccgtgccgtagggtgtggcgcgctgtccgcataccgccgccggctcgatgccctctgtggtaccccgcaggatgccgtattcctccgtcagccggtccttttcctcgcacagcagcagacgccccctgtgcaaaaatgcgatgtagtcgcatatcttctccagatcgctgacgatgtggctggatatcagcacggcatgctcctcatcccgggtaaagtccgagagaatggtcaggatatcgtcccgcaccaccgggtcaaggccgctggtggcctcgtccagcaacagaagcttcggttgatggctcagcgccgcagccagccccagccgcatcctcatgcctcgggagaagtccttgaagggcttatcctccggcagcgccagccgccgcagatagtctctgtacacctccggctgccatcgggtgaaaatgcccgccatcatgcagccgatctgctgcgcgttcatgtactccggcagtcccacctcgtccagcaccacgccgatgtcctcccgctccaatgcagtcagcgcccggttgtcctttccgtaaacggcgatggtaccgccatcccgccgcaggccgttcagtatcagccgtatggcggtggacttgcccgcgccattctcgccgatcagacccatgatgcagccggcgggcagcgtcaggtcaagcccctgtaaggcaaaatcaccccgccgcttcgtcaggccgcgtatctccaatgcattcattctgcttcctccttctgcaagcgccacatctcgtccaattcattctctgtcagccggcaggcggacgccaaacggcggacctcctgcatatggccctctatcttcttcaaattctcctcccgcagcagttccgtgctgcgctccgccacgaagcaccccttgccgggcagcgtgtagatgaacccctcgctctccagctcgtcataggcccgcttggtggtaatgacactgatacgcagatccttggccagcgcccgtatgctgggcagcgcctcgccctcggtcacctgtccggacaatatggcatccttgatctggctgtatatctggtcatagatgggcgcgccgctgcggttgtcgatgtatagctgcataagaggcctccttgtgcaaactgtatatgtacagtatacacagttaattccgattgtcaatagcaaatttctgtggtacaatatccggcagaaacgcagtacacacaaaggagcccttcatgtatatcggaaacgtagaaatacactccaaactgtacctggcacccatggccggtgttacggatctggccttccgccagatctgccgtgagctgggcgcaggcatgagctgcacagagctggtcagtgccaaggctctgtgctatcaggacaagaaaagccggggccttttgaagctggcccccaacgaaaagcccgccgctgcccagatcttcggcagcgatatcccctgcatggctgaagccgccgtcatcgccgccgagatatccggcgcagacattatcgacatcaatatgggctgcccggtgggcaaggtagtggccaacggtgacggctccgccctgatgaaggacccagagaaggctgcccgactggccgaggcggtggtcaaggccagccccgtacccgtgacggtgaaaatgcgccggggctgggacaaaggcagtatcaacgccgttgagttgtccaaaatgctggagcaggcaggcgtcagcgccattgccgtccacggccgcacccgcacccaaatgtacagcggtcaggctgactggaccaccatccgccaggtgaaggaagcggtatccgtgccggtcatcgccaacggcgacatcttttcggcagaggacgccgtccgcattttacagttcaccggtgcggacatggccatgatcggccggggctgcttcggcaacccgtggctgtttcaacaggcccaggcagcgctggagggccgtcccattcctcccctgccgccgctggcggagcgctgggacaccgccgtgcggcagatcgaactggccgttgcggacaagggcgagcacatcgccctgctggaggcccgcaagcagctgtgctggtaccttaagggtgtcagccacgccaattactacaaagaacaaatcgtccgcctgaccacactggaggaactgtaccgggtggcggcgggtgtcaggagggatctgcgatgaacaatgaacaggacatcctgcgccgcgcccagcagggcgacagcgaggcttttcgcctgctggtggaggcctatcagacgcaggtgtaccgtcttgccctgcgaatgtgcggcgaagcggcggcagacgacgtgacacaggaggtatttcttgccgcgtggcgggcactgccggagttccgcggcacctgccgcttttccacatggctctatcgcctgaccaccaacgccgccatcgactggctccgccgggagaagcgccatcggggcatggacgacgtcaccgagctggagctgccggacgatggtcccagcccgcaggaccaggcagagcaggcggaagcacagcaggccgtccgccgtgcgctgtcccggctgtcagaggagcaccggcaggtcctgctgctgcggtatatgcaggagctggactatgccgagatcgccgcggcgctggagatcagtgagggcaccgtgaagtcccgcatcagccgggccaagatgcggctgcgggaattgctggacggcagcgggaacctttttgacggtggggccgtcttacagacagagatcagtgaaaggagggagcagccgtgacacagcagccctttgacccgatggacaaattacttcgcgaagcgctggcgagcgacgccctgccgccctccgacctgacggaccgcattatggcacaggtggagagaacgcctcagggcggcagcgccgcctccgattccaaacgcaattataagaaatggttgctgaccgccgccgcatgtctggtcatcgtgggcgcggcgtttcccctggcgctgcaaggccgcgccggccggaccgatcacgctgcagatgacgccgcccccgccgatacgaatgccgacaacgacatggtcagcagctactacggtggaaaccgcagcgatgtgccagatggcgccgcgccgtctgacggcaccggcggatacaccgagcaggcacaaaagaacaactccgcacacgaccaaccctttgacccgatggacagcgctctggaccatgcggccgcgctgctggagcagcagggctgtacgctggaggtcctggcccgtgcggatgatgcggtgcaggtggccattgccgatgcggacacccatccctccggcaatacggacctgctgaaaaatgccatggtggcctccggtttcgcgctggagggcgactggtatgtgttggaacaggaggaaacgaccccgtgaagctacacaccaagcaactgaccctcgcggcgctgaccgccgccgcctacgccgttctcagctatttcggctctattttcggcatcacctacggtcctatccagtgccgtttttccgaggcgctgtgcgtcctgcccttcttcctgccggagacggcctggggtctgggcgtgggctgcctgatcgccaacctgctcagtccctacggcgtgctggacatcgtggtcggctccgccgccaccctgctggccgccctgctgaccgcccggtgccaaaagaagtggctggcccctctgccgccggtgatcgccaacaccgtgcttatcggccttgtcctggcctatgagcaagcgggtacctccgctgctttctggcccacctacgccttcaatgccctgaccgtgggcctgggcgaggccgtggcctgctatggcttgggcggcctgctgctgtggcggctggacaagagcaatgccttacagcgctatttgcagaaccgatgaatgaaaaagccctccgtgaggagggctttttgccgcaaacgctgctctgcggacctgaaatgcactccgggccggttgcaatccacggcgcgttgtgttaccctaacacttaccacggcgcccctcgggctccattaaaggacgtatacgttgtatgaacgagagagatagaaaaaaacataccgccacctcccgcctggacaccagttctctgccccgcggcccgctgaactgggtatttttcccggcggcgctgctgtaccacgagctgctgctgcgggccttcgacaggcagagcaccttctttaccgggacgcttgtgctggtggtgctgttcgcactgggcgcaggactgtcctggagtctgctcatcaatctgttccgtcaccgccaggcggctaccatcgtctctatcgccgccaccgccctgtggacggtgctggtgtgcgtggagtactgctgccgcagttacttcaagtcctacttcgccctggcgttcatcggcaacatggccagcgatgtagtgggcggtttcggcgacacggtcctgccggatgtcgtgctgccccgcctgccctttatcctgctggcctttgttccgctggcactgtgcattctgctgcgccggcgcatcgtcaccgagcagcgcatgggccgctggtccctgctgttcctgctggtcgtatgcctgctgttcggcggcatcggcagcggcctggcccgctggggcacctatcacgacgcctacacctacaacttcaccaccgacaccggcgtgacccacttcgggctcaacgccagtgtccgtctggagatcacctacgccattttcgggcaccccagtccccggctgccggacactggcacgaacgcagatgtaccggataacacccctgttgtcacaacgccggtggtctacggcgaaaataccatgaacatcgattttgccgccctggcagagaacgcctccagcagcaccgtggcccgtatgtccgactacttcggctcgctgacgccctccaagcagaacgcgtacaccggtatgttccagggcaagaacctcattcttttcaccgccgagtccttttctccctggttcatcagtgaggagctgacgcctaccctctaccgtctgacccacgagggcttcgtgttcgacaatttctatcagcccggctggggccaatctaccaccggcggcgagtacgcggtgatgaccggtctgctccccacgtgggtcaacggcaatgtcagcttctacgccacagccaacaacagtatgccctttgccctgggcaatcagttccgggctctgggctacaccaccgccgcctaccacaacaatatctacaactactaccgccgggacaaaacccatcccaaccttggttacgactatcaaggtcagggcaacggtctgcagctgaccgaggacggcagctggccctactccgatctggagatgattcagaacaccatcacgcagtatattgacgcctatgtacagaacggcacacccttccatacctactacatgaccgtcagcggccacggcggctacggatggggccacgccatggccgccaaaaaccgtgccaaggctcaggccgcctatcccaacgcctccccccaggtccaggcctatgtggccgccaacctggagctggagaacgcactgacctacctggtaaacgcgctggagcaggccggtattgccggcgacaccgtcatctgcctggccgccgaccactacccctacctgctgtcagagacagacacggactattacaacgagctgcggggctttacagactcggagcgtgacacctcccgctaccgcaatgcgctgatcctctggtgcggcggcatggaggaagctgttaccgtatccgaaccgtgcagtgccgtggacatcgtgcccacgctgagcaatctgttcggactggaatatgactcccgtctgctgtccggccgggacgtactggatcaggactacgaccccgccgatgcctacggcagtatcccgctggtgatcttgcccactgctgccggcaacagctgggccaccgccgccggcgtgtatgagtcctctacccgcaccttcaccgccaaccccggcgtcacggtgccggagggctatgtcaacgccatcaacgaccgtgtgtccctgcaatactactacgcggaactgctggtgacctatgactattacgccattgccctgggagaccgtgcccccaacgcgccgcagctccccacccccaccccggcggaggatatgacgccggaggaaacactggagcagccggactacatagaaccggagacataagcagcgagcgccgtcctgtcggacggcgctcgttttcctatgtactcagcggctgcccgcgccgcccgccgttgtctccgcgccggatctcgcatctcccccggataccggcttcgccgcggccgccgcagatatgggacgtccaccgttctcaccgccaacgccgaacagctcatacaccatgcggcgcaggatatagcgcctgtgctcacgcttataccgttccatttccgttgttatacccccatttctccgccgcccggctggcggtaggcactctgctgtctgccattataacaccgcatacggtcgaagcgcggcggaacacgtctgctgccgccgccatcttcgtcacaacgggcgaaagcgccccatctggagcgctttcgttctttctgtacaccaaattcgtcaatgccgacccacgcggtcccagtccgcctcgttttcgtacagaaggcgggtcccctccagatactgggagtccatcgggttactgatagataccgccgccttatacttctccagtgcacggcgggatttctccggcggctgcacagtgccggcaccggcaatacacccgccggggcaggccatgccctccagcagatagccgtcatacttgcccgtccgggcgatacgcagcatccgccggcactcgttcagcccctccgcggcggcggtcttgaccgccacctccgggtgcaggcggtggatcacctcctccaccgccttggccacgccgccgccggcggcaaagcctacgccgggggcactggcctcatagtgggagggcagatcggggatctggctgaaatcgattcccttggcctcaaacattcccctcagctcctcgaaggtgatgacaaaatccacatcactgcggacactgcggcggctggcctccagctttttggcggcgcagggaccgataaagacgacgcggcacccgggacgccggcgcttctgcagccgcgctgtcagcaccataggcgtcatggtcatggagatatacggcgcaaagccggggaactcctttttggccatcacagaccatgccggacaacaggaggtcgccataaatggctgcttctccggcaccatacgcaaaaactcctcggcttcctccaccgcgcacagatcggcgcccacggccacctcctccagcgcggcgaaccccagctgctgcatagcggccttgatctgccccggcgttacattgtctccgaactggccccagaaggccggcgcgatcaccgccaccacctcgtcgccccgacggatggcgtggatcagttggaacagctgtcccttatccacgatcgctccgaaggggcaattcaccaggcacataccgcagttgacgcacttgtcatagtcgatcttggcgtggccgtactcatcctggccaatggcattcatgccgcaggcctcctggcaaggccgggtaaacttgatgatggcgtggtaagagcaggcatcccggcatttgccgcacttgatgcacttatcctggtcgatatgcgcctgtccgcgttcgatagcaacggcccccttatggcaggcattctggcaatggcgggccagacagccctggcaggcattcgtgacctcatagtgagtaggcgtgcagccgttacaggcgtattttatgatgttcaccagcggaggatcgtagtacttctccgcgatggcactctcctccaccccgtcgctgagcaggctgtgctccgccaccggccgcaggggcaggcccatagccagccgtatgcgctcgcctacgatagcccgttccagaaagatggactcccgttggtttcccacctcaccgggaacgatcttgtagggcagcttttccatgcggcggtagtctccgccctcataggccagccgcgccacctcggcaaacacttgcttacgcatatccgcgatggagcatttaaagtttctcataggtacacttttcctccgaaacccccagtcttttgttaccattataacaaattcattatggaaaacaatgtgcagttgcgagaatttctatcgccgcgcgaatgtttcctcatgcaacctgcacagccttccgccacagccgttaaggcgttgttaagatgccttttatctccggtcccgcagggcctcctccagcttgtgcagcgcctttttttcaatacgggacacatagctgcggctgataccgtaatggagcgccacctgccgctgtgtctggggcaaatggccgtccaggccgtagcgccgccgcagaacatccgcctcccgaggggtcagctcccgggccagcagctgatgcagcagacgtctgtcctccttgctttgcagctcctccagcatggtgtcctcttctcccaccacatcgcccaaatacaatgcgtcaccctccggccccgtgtccagcgcctcgttcagcgacacctccccctgcaattttttctgtccccggaagtacattagtatctcattttctatacaacgagcggcgtaggtggccagcttgattcccttgtcagggcggaaggtattgaccgccttgataagcccgatcgttccgatggagatcaggtcctcctggtcagtggactgcgtgtaatacttcttgatgatgtgggccaccaggcgcagattgtgctccaccagtatattccgggcctccaaatctccggcggcacagcgctccaggcactccctctcccgggcagcagacaggggcttggggaaggacccggcgctaccggtcaggtgcagggacaaaaacaggctgttgcacagcagcaacagtgcagcagacagcatacgcatcgctcctttcacaacaccctatgccctatgggaatgtccctatacaaaaagaacacggacggcagcgtcgtccgtgttacagttcctcctccggaagggcctcaccctcctcgccattgccgaaggcaatggccgtcctgccgtatttttggcggatagcgtccacggcctcctccagctgctcctgccgctgaccgcaggcctgagcggtactgtccagcagatccaactgttggaaagtgctgcacgtctcggtgacgtacagcgccgttacggtcatggagcgaaggcgggcaggcggcttccacagctgccgggccaggtccgcagccgcacggtaaatatcccggaccagatgggtaggcgcgtccaagcgggtctggcggctgaatgttttgaacgatacgtctttcagcgtcacgctgacgccgccggcatacaggccgtggcggcgcaggcgggcggccacactgtcgcacagaggcatcaagccggcgcagatctgttcccagcgcaccaggtcatcggggaaggtagtgccgttgcccacggacttgaccggatcggcggcgtggcgtggcttaacagggcttttgtcaagaccgttggcgtattcccacagctggcggcccatctttcccagcagctgctcgggcatggcgggatcgcaggcggccaactgaccgatggtttctataccgtattttttcagggtctgggtggcggcgcggccggcgtacaacaggttgcccagcggctgcggccaaacgatattttgccacccgtctatcggaatgaccgttgtagcgtccggttttttcatatcgctgcccagcttggcaaacactttattgaacgaaactcccacagaaattgttaatcctgtctcattttttactgtttttcgaattttattggccagtttttccgcgtcgccgccgaagaggtggaggctgccggtgacatccagccagctctcgtcgatcccaaagggctcgatcaggtcggtgaagcgctcgtagatgtcgttgacgcggacggaccacattttatacaggtcgtgatggggcggcagaagtacgaggccggggcacttctttttggcctgccagaccgtctcagccgtttgtattccgtactttttggcgggttcgttcttggccagaatgatgccgtggcgggtcttcgggtcgccgcagacggccaccgggacctcccacaaagcgggcttgtccagcagctccacagaggcgtaaaagctgttcagatcacagtgcagtatgatgcgctctcccatgcttttcacctcccggcacagcaaatttctttggcagtatatgatacaatgtctgtaccttttctatactttcttcacactttttatgcgctcctcatgcgccttttcatgcaccttttatgcgctgttgggtcaggttctttttctcttccttccagccccccttttcggggccaaaaacgaaggcccggacggtcgtcttcatgtgcgccccctgcacagggggcgcacatggggactgctcaatagccgatccggcggtccaccagacgcaggggcttctcaccccgaccgtagcgctccaggtcctcacagaaaagctgcacgtttcgatcgcgggtgtagcccaggctcatctgaccggagatgtggggggtgatgagcaggttcttcgccgtccaggccgggtcgccggcggggatgggctcttgctcaaacacatccagagccgcgccggcgagacggtcgtggttcagggcgtccagaagggcggcctggtcgatggcgctgccgcggcccacgttgaccacataggcggtcttcggcagcagggcgaggcgcgccgcggagagaaaccccttcgtctcaccggtggcgggcagggccagggccaggatatccgtatccggcaggagggcgtccagctcgtcgttggtatggatctcgtcaaaggcgaggtcggcggcctttttggtgcggcggacaccgcggacggcggcagcacccatggccttggcgcggcgggcgaactcggtgccgatatcgccggtgccgacgatggtgatggtgctgcccataatggagcgcatgggaagcacacggccccagcggccggcggcctggtcggcgcagtaggccggggcgtggcgcaggagcatcagcgtgaccatgaccatgtgctcggcgatggtgacaccgtaggcgccggaggagttggacagcatgacctcgggagagggatacaggctgtcgtccagataagcgtccacgccggcaaagctgccgcagaaccacttgaggttcacgaagtcctttaattcaccgggcttgggcataccgtagatgacctcatagtcaccccgcttgtccgcggggacggcggcgggggccgcgtagtagtccacggtgaagccggcgcgggccgctgtctcgtcgatgagccggcggtgcttgggctcggtgaagctgtcatagatggcgatctttctcatgttgtatatacctccaggagtttttccgcgcagcgcattccgtcggcggcagcggagaggatgccgccggcatagccggccccctcgccgcaggggaatatgccgcgtatattggcttcatagtgcgcgttacgcaccaggcgcaccggggaggacgagcgcgtctccacgccggtgagcagggcgtccgggtcatcgtagccccgaagctgacggcccaggaccggcagggccagggccagcgtctcgccgataaaatccggcagacagcggcgcaggtcggtatagaccacgccggggcggtagctggggcgcacgatccccggtccggcggagggacggcctgtcagaaagtccgccacccgctggcagggggcggcaaagccgccggtgagggcgtaggccgccgtctccagctgccgctggagggcaattcctgcaaggggatggtccgaggggaaatccgccggcgtgacattcaccagcagcgcgccgttgatgttctccccatcacgggcatagacgctcatgccgttggttacggtgcgccccggctcggaggcggcggccaccacctgaccgccggggcagacgcagaagctgaaggcgctgcggccgttgggcaggtggcaggacagcttgtaggtgctggggggcaaggccgggtggcccgccagagaacggtactgggcggcatcgatggccgactggcggtgctcgatgcggacacccatggcgaagggcttgggctccatatacagtccgacgcgatgcaacatttcaaaggtatcccgggcgctgtgacccagggccaggagcacatggcgggcgggcaggtcataggtctgcccgttctggcagacggtgacggcgctgaccgcgccgtcctgtatccgtatatgctccagccgggcgttgaagcgtatgtccgccccggccgcctccagctcctgccgcagggcctgcagggcgatgtggagcttgtcggtgcccacatggggcttggcgtcggtcaaaatggtatccggtgcgccgcagcggaccaacgtctccagaatgaagcggtggcgcagatccttcgtaccggtgttcagcttgccgtcagaaaaggcgccggcgccgccctcgccgaactggacattgctgtccgggtccagcgggccgccggaccagaagcgctcaacgtccgcctgacggtgttctaccggccggccgcgctccaatagaatagggcgtgcgccgcagcgggccagcaccagggcagcgaacaggcccgccggtcccgcgcccaccacgatgggccggaccgccggggccgtcaccggcggcggcaggaagtatacttcctgtttatagacggatatgcgcttatcgcggcagcggcgcaggacctgggcctcgttttttacagagacggacaccgtgtagacaagggtcaggtcttcgcgggcgtcaatggcctttcgcagaacggtgcaggcggtgatgtccgccggagccacgcggagcagcttggcgcaccgggcgcgcaggagcgtctcctgctggccggggtgcaggcgcagttggtcgatacggagcatgggtgcgtctcctttttataggatcgggtgggggttcgccgccgcggcggcgagttggctttcccctggcggggaggcggcctccggcggccacatttctttctgcgaagaaagaaatgtgggaaagaaagtcgcttagacctacggtctaaggaccccttggcgcggggcgggtaagtgcaaatttggcggtgtgtactcgcgcatgaagtgcagtgggtaacattgtcggttcagggatcgcttgtaccgcttgcgccgctgccgctgacagcggtgagggtaggggttggtgcgctggtcgtttttggcgattatcaaatcgcgcctttgccgccgcaaggcggcaaaggtaggtgtgcccgttgggcacagaatataattatttcttagcctgcgacacggcagaacgaataatttttaccatagtagcaggcagcggcagcggaaagctgtgctggcacagtcgggggaccgacaacgatcaggaaaacgccggttacgtgagggaaagcgcgggtggcagtgaacaggcgtagcgcgctgaggaagtgcagaaacgcagtttctgccggcgttctttccccccatttcttccgctgttggaagaaatggggccgtcggagacaaagaaagcgctcgcgccggggcgcgaaatagcccctgcggcgggtacggggggggctttacgccgctgcgcggcgacacctcattcgccacggcttcgccgtgccacctgtctccctgcgggtcggtcggttcgcggatctgacacgccaccggcgtgtcattcaacaccgcggacccatcaaggggaaggcttggcgcctgcgggcgggtgttcaaagaaagttcacggtttttctgcaaaacttaaaggtagaattaaggaaagcgagtatgctataaaacagaaagagcaatgagccccttcgaagcaggcacccttcttcatgtctgcttcctccatcataccacgctttcccctcggcggcaagatgggagagcgctccttatacgaaactgcgacacaggaggtcattacgatgtataacgacgaattcaacaacaacgatatgtaccgcttcaccaaccgggaggtgccccgcgacgactacgcgcccgcaccccggcaggagaacacgtataccgcgccggtgaggaagcagggcttcttccacaggacgtgggtaaaggtcacagcgctggtgctggcctgcgccgtggtgggcggcgcggcaggctacggcggcgcggcgctggcaggcggcagcacctccggcggcaagaccaccatcaatgagagtgaccgcacggccactgccgtgcagatcaagaaggtggacggcaagacgaagatgcagcccgccgaggtctatgcctccacggtaaactccaccgtgtccatcaactgctccaccaccaccaacgtgttcggtcaaaccacccagtccgcctccagcggcagcggcttcatcatcagtcaggacggctacatcgtcaccaactaccatgtgatcagcggcgcctcctccgtgaaggtgacgctgtataacggcgacacctacgatgccaccgtcatcggcggcgacagcgactacgatgtggcggtgctgaagatcaacgccgccgggctgacccccgtgacattgggcaacagcgccgatgtgaacgtgggcgactccgtgctggccatcggcaatcccctgggcgagctgacgttctccatgagcggcggctatgtgtccagctgcaaccgcgccatcaacgtggacggcacccccttcaacatgatccaggtggactgctccatcaaccccggcaactccggcggccccctgatgaacctgtacggcgaggtggtgggcatcgtgtccgccaagtactccacctactcctccaccacggtggagggtctgggcttcgccattcccattgacgatgtgaagtccatcataaccgacatcatggagaacggcgccgtcaccggcaaggcatacatggccgtgaccgtgggcaccatgaactcccagatggccgctcagtacagcatcgacatcgatcagggcgtgttcgtctactccgtcgtcaagggcggcgccggcgacaaggccggcctgcgcctgggcgacgtgatcaccaagatgggcgacaccacgctgaccagccgtcaggatctgtccgcggcgctgaagagctaccgcgccggcgacaccgccaccctgaccgtgttccgcgacggcagctacatcaccaccgacatcaccttcgaccaacagccccagatcaccggcaccgacacggaggaggacacctcctctcagggcggtaataacggcggttacagcggccagatccccgagaactggcaggagttttataactacttcttcggcaaccggggctgataccggcccgggaacagcggcataactgaccactatgccgccaagataccacgatcttcttcacattcttcatgtttcccagcacacattcgcttcccccgcaccgtccctgccggagctaccccgccggcggggacggttttttgcgcggttgcaaggcgttgacagatatggtataattctttattggtatactatgtggaaaaatgaggaaacgactatggaagtaacacagggcgcaccgtttgagagctttggcctgtcagaggccaccatgcgcgccatacgaaataagcactacaccgtcagcacccccgtgcaggccgggtgcatcccccccatgctggcggggaaggacgtgatcgccaaggctcccaccggcacgggcaagaccatggccttcggcatccccatcatcgagcgcatcgaccgggagagtgaggaggtgcaggcggtcattctggcacccacgcgggagctggccatgcagatcaccgacgagatgcgggacatcgccgtgtgccacgagggcgttcggctggtatgtctgtacggcggacagcccattggcaagcagatcgacgcactgaagcggcggccccaaatcgtggtggccacgccggggcggctgagcgaccacatgaagcggcggaccgtgaatttgaagagcgtgcagacggtggtgctggacgaggcggaccggatgctggatatgggctttatccacgacgtgacgcgtattctggacaagatccccagccggaaaaacctggggatgttctccgccaccatctcgcgggaggtgatggacatctcatgggtataccagcgggacccggaggagatcacggtgcaggccaccaaggaaaacaagccggacattttgcagtaccggctggaggttccctccgacgggaaggtggacgccattgcgaagatactggcgcatgagaactatgaccgggtgatctgcttctgcaacaccaagggcagcacggagcggctgacaaaatttttacagatgcggggcgtggacgcccagtgcatccatggcgacattccccagcgcaagcgggaggaggtcatgcagcggttccgggacggaaagctgcgggtgttcgtggccacggacgtggccagccggggcatcgacgtggacgatgtggacgcggtgttcaactatgaggtgccggaggagaacgagtattacatccaccgcatcggccggacgggacgggccaagaagcacggcgtggcgtacacgctgctcagcgacttccccagccggctgcggctggacaacatcgcgcggaacacgcggagcaccatcgtgcccgccgtgctgggcgaggacggcagtgtgactgtcggcgagaaatgagaaaagagcgcacttcagcaggcgggtccttttttacggaacggcagcaggtgggcgccgttgggccgcgcgggttgctatttcgcgcggtgtgtggtacaatatacacatatagccgcaaaatcccgaaaaggagcgaagataatgaacgaagagttgaagaatatcctctcccgcgtggaccacacgctgctggcacaaggtgccacctggaatgagatcaaggccatctgcgacgacggcatcaagtacggctgtgccagcgtctgcatccccgccagctatgtgaagcaggcggcggaatatgtggacggcaagatcgccgtctgcaccgttatcggcttccccaacggctacgacaccaccgccgccaagtgcttcgaggctgccgacgctgtgaaaaacggtgcgtccgaggtggacatggtcatcaacatcggttgggtgaaggacggcctgtacgacaaggtgctggatgagatccgccagatcaaggccgcctgcggcggtaagctgctgaaggtcatcatcgagacttgcctgctgacggacgcggagaagatcgagatgtgccgcgtggtgtccgagtccggcgcggactatatcaagacgtccaccggcttcggcggcggcggggctacccgtgaggacgtagctctgttcaaaaagcatgtcgctccccatgtgaagatcaaggccgccggcggcatcgcagatctcaacgacgcccgcgacttcatcgcactgggtgccgaccgtctgggcaccagccgcatcgtcaaggccgtgaaggccatggaacagtaaatataaggaggaaccactatgccgactccccacaataacgccaacaagggcgatttcgccaagaccgttctcatgcccggcgatccgctgcgggccaagttcattgccgagacgttcctcaccgagccgaagctggtgaacaacgtccgcggtgtgcagggctataccggcacgtacaagggcgtgccggtgtccgtcatggccagcggcatgggcatcccgtccatcggcatctattcctacgagctgtacacccagtatgatgtggagaacattatccgcgtgggcagcgccggtgccatgcgtgccgacctggagctgggcagcgtggtggccggccagggcgcctgcaccaattccgactttgccagccagtatgagctgggcggctccttcgcccctatctgcgattttgacctgctgatggccgccgtggagagcgccagggagctgggcgtcaagatgcccgtgggcaacctgtattcctccgacacgttctatgacgccgccgggcgcaacatgcgcttcgccaagatgggcgttatggccgtggagatggaggccgccggtctgtactgcaccgccgcctataccggcaagcgggcgctggccatctgctccatctccgacaacctggtcaacggcaccgagctgtccgccgatgagcgccagaccaccttcaccaatatgatgaagatcgcgctggaggcggcggtcaagatggccgcaagggaataagcgtttgtgtgacagcacagggtgtaatgctctgtgctgtcgttatcaacagcacatttgtgcgttttgtagaaacaaagtgtaaatttttgattacatttgtttacaattcgcccgcaaaatgcgtttttcccttgccaaaggcgaaaaagtctgctataatgcgcaaggcacagggggaggaagaccccgtgccgaaatgatggttttcccgccgcaaggcgcgaaaataaaaaaattgaggaaggtagaataaccatgaagaagtttcttgctatgatcctggctctggttatggcgctgtccctggtcgcttgcggcgacaagaaggacgaccccaagaccgacgacaaccagggcaacaatcccgaagtcaccgagatcaccaacgccgacgagatcgccgatgagatgacctccgaggatggcaagtacgagatcgctttcgtcaccgacgtgggccagctgaaggataagtccttcaaccagggcaccttcgacggcgtgaagctgtacgctgccaacaacggcctgagctacaagtactatcagcccgccaacggcgaccaggctaccgatgacgaccgttacgatgccatgaaggctgctgccgagggcggcgccaaggtcatcgtggctgccggctttatgcaggccactgccctgaccaaggccgctgctgagttcaccgatgtcaagttcgtgttcgtggaccgcgacagcgctgtgaccaccgaggacggcaccgccctgaagaacgttctgggcatctgcttccaggaagagcagtgcggctatctggccggttacgctgttgttaaggaaggctacaccaagctgggcttcaccggtggtggcggcggcgacaaccccgcttgctgccgttacggctacggcttcgtgcagggcgcttccgctgctgctgctgagatgggcgtgaaggtcgagatgaactactcctggctgtatggcgcttccttcgccgcttccaccgagctgcagaccatggcttccggctggtatgagaacggcaccgaggtcatcttcgcctgcggcggtaatatgttccagtctgtcgccgctgccgctgccgctaacgacggcgccgtggtgggcgtggacgttgaccagtccagccagtccgataccgttatcacctccgctatgaagggcctgtccgcctccgtgcagtgggcttgcggcaaggtctatgacggttccttcgacgagatcggcggcacctttgtgaccctgggcgccaaggacaacgctgtgggcctgcccaccgctacctggtccctgaccaagtggactgtggacgactacaacgccatgctggccaagatggccgatggttctctggtcgtcgacaacgactactccaagctggacagcaccgacagcctgaccctgaacctggtcaagtaatcggaacgtacttaacaaaaaaagagacgcctgcgggcgtctcttttttttgcgtcaagcgccgtgatgcgaggagtaaaacgccgctgtttttcttgcaatctgtgcatatatgctatataataaatttatgcctttatcgccattaggcaaaataatagaggaaagtaggtggcggcatggataagactcccacgtatgtgatcgagatgcttcacattaccaaggagttccccggcatcaaggccaacgacgatatcaccctccaactgaaaaagggagagatccacgcgctgctgggcgaaaacggcgccggcaaatccacgctgatgagcgtgctgttcggcctgtaccagcccgaggcgggtgagatacgcaagaacggccagacggtgaagatcaacgatcccaacgatgccacggcactgggtatcggcatggtccaccagcacttcaagctggtggaggtattctccgtgctggacaacatcattctgggcgccgaaacgacgaagtgcggcttcctgcagaaaaaggaagcgcggaggaaggtcgaggagctctccaagcggtacggcctgcacgtggacctggacgccaaggtggaggatatcactgtgggtatgcagcagcgtaccgagatcctgaagatgctctaccgcgacaacgagatcctcatcttcgacgagcccaccgccgtgctgacgccccaggagatcgacgagctgatggccattatgaagaacctgacggcggaggggaaatccatcctcttcatctcccacaagctcaacgagatcatggcggtggcggaccgggtgacggttctgcgtaagggccgctatgtgggtaccgtgaacacctgcgacaccaacaagcaggagctgtccaacatgatggtgggccgcccggtgcagctggaggtcgtaaaggagccggccaagcccacggatgtggtgctgaaggtccgggatctgtgtgtgccctctcatacccacaagcgcaacgccgtggaccatgtcagctttgatgcacgcgccggcgagatactctgtatcgccggtatcgacggcaacggacagacggagttcattcacgcgctcaccggcctggataagagcaatggcggcacggtgacgctgtgcggcaaggatatctcccacgccagcatccgtcgccgtggagagtgtatgagccacatccccgaggatcggcacaagcacggcctggtgctggattttacgctggagcagaacctggtgctgcagcggtataaggagccggaattcgaaaagggcggcttcatcaaaaaggacgcggtgcgtgcctacgctgagaggctgatcgaggaatacgatatccgcagcggacagggccccgtgaccaccgcccgcagtatgtccggcggcaaccagcagaaggcgatcatcgcccgcgaggtggaccgcaacaagccgctgatcgtggcggtccagcctacccgcggcctggacgtgggcgcgatcgaaaacgtacacaaggaactggtaaagcagcgtgatgccggcaaggcagtgctgctggtatccctggagctggacgaggtcatgagcctttccgaccgcattctggtcatgtacgagggtgaagtcgtgggtgagttcgacccgaagcagatcaccgtgcaggagttgggcctctatatggccggcgccaagcgggcggacaagaaagagggtgagacggcgtgaaacaaaaactgacagatctgtatgccaagaatggcaccaagaaagtcctggcctctctgctgtccatcctggccggcctgctgctgggcagcatcgtggtcattattgtgggcttggcggagcagaagatcaccaccgccggtatgtgggagggcgtccgcctgatttttgccggcatcctcagcacaggccgcgacgctgcgggcgcgctgacctggggctttaacgcccagaatgtgggcaatatgctcttccgcgccatgccgctgatcatgaccggcctttccgtggcggtggccttcaagacgggcctgttcaatatcggcgcacccggccagtatctgatgggtacgcttgtctcgctgtccgtcgcgctgggcatcccctccgagtccgtgcccgttggcatcatctggctgctggcctttctgggcggtatgctggctggcgccctgtggggtgcgatccccggattgctgaaggcgctgctgaatatcaacgaggtgctggcctgcatcatgaccaactggatcgcagccaatcttgtcacctggatgtttgatatcagcagcttcaagaacgtaacagagggcacgaagtccggttacatctacaagaccaccttcaacggtgtggccacacccaagctgggactggatcagctgtttcccggctcccaggtcaatgccggtattctggtggccatcattctggccatcgtggtgtacattatcatggagaagacggtgttcggctatgagctgaaggcctgcggcgccaaccgccatgcggcccgctacgccggtatccccgataagcgcaatatcgtgctgtccatggccattgccggcgcgctggccggcgccggcgccgcgctgtactggctcagcggcaacaccgagttctactggaacacctaccaggccctgcccggcgtgggctttaacggaatccccgtggccctgctggcggtgaacaaccccatcgcggtcattttcaccggcatcttcatggccatgctggatatcgtcggtctgcagctgaccaacctgaccgcctacaacgagtacatcaccgacgtgatcatctccgtcatcgtgtatctgtccgccttctctctgctcatccagatgatgctgaccggacggaaaaagaagctcgtcgtggaggccaacaagaccaccacggcggatataccggcagaggcggagacaccgccactggatgtgccgccggaggacataccggacataccgatggaggaagcaccgcaggtacctgagcagccggaggaaggaggggggcaggcatgacatttctgatccaacagaccatgatctacgccgttcccctgatgatcgtggcgctggccggcgtgttcgccgagcgcagcggtatcatcaacctggcgttggaaggtattatgatcctgggtgcgtttatcggcgtgctgttcgtgaacatcatgcagaccaaccatgtctacgacgcggccaaggctgccggcgactgggtggctttgcagggctttgagctgctggctatgctggtggcggccatattcggcgccattttctccctgctgctgagctttgcctccgtaaatctgcgggcggaccagaccatcggcggtacggcgctgaacctgatggctccggccctggtgctgttcctcatccgtatcatcgccaaccagaacaccctgcaaatggccaccggcgatgcggccagttggttcatgatcaagaagaccactctgggctacgcgaagacggacgacctgggcttcctgggcaataccttcctgcacaaggtgtatctggcgacctatgtctgcatcatcattttcgtggtgctgtcgatcctgctgtacaagacccggtttggcctgcggctgcgctcctgcggtgaaaatccccaggcggcggactccgtgggtatcaacgtgtacaagatgcgctatgccggtacgaccatctccggcgcgctggccggcatgggcggctttgtctacgccctgaccacggccaactgcacggccaacggcgatgtggcgggcttcggcttcctggcgctggccgttatgatcttcggtaactggaagccgctgaacatcgccggggcgtcgctgctgttcggcctgttcaagtgtatcgccgcggcgtactccagcctggatatcaacggcgacggcgtgtattggctggcggagatcggcatcagctcccacgtgtaccgtatgctgccgtacctgatcacgctggtggtgctggccttcacatccaagaaatcccgcgcacccaaggcggagggtatcccctacgacaagggccagcggtaaaagaagcataaaaaagaagcacccgtacgggtgcttctttttgcgctgttttacatggattttacaaaagatggcctgcgaacttgacatttataccgtacaatgtagatggacaataaggtgacatctgagaaaatgtaaagttgagggaaagaaaatggatatttttcatgcgctgaccatgctgggcgggctgtgcctgtttctgttcggcatgaatttcatgggccaggcgctggagcgccgggccggcggcaagctgcggacgctgctggataaaatgaccggcagcgtgggtgccggtttcctgaccggactgggcatcaccgccatcattcagagctcatcggccaccaccgtcatggtggtgggcttcgtgaactccgggctgatgaccctgcggcaggctatcaatgttatcatgggcgccaacgtgggcaccacggtgacggcctggctgctgagcctggcggggatcgacggcggcagcgtgtggctgcagctgctgaagcccaccgcctttacgccggtgctggcgctgatcggcatcattttctatatgttctgcaaggacagccggaaaaaggagactggctccattctgcttggctttgccacgctgatgttcggcatggacaccatgagcgccgcggtggcggggctgaaggacgtgccggggtttgcagagctgtttttggcctttacaaacccgctgctgggcgtgctggtgggcgcggtgctgacggcgatcatccagtcgtcctccgcctcggtgggtattttgcaggcgctggcctctaccggccaggtcagctacgccgccgcggtgcccattatcatgggccagaacatcggtacctgcgtcacggcgctgatctcctgcgtcggcaccaacaaaaacgccaagcgggcggccgtggtgcatctgatgttcaatgtgatcggcgtggcggtgctgctgacggtgttctgcatcgtcaaggccatctttgccccggtactgctgaacaaggcggcgtctatggcgggtatcgctgtggcccattcggtgttcaatatcttgtgtacggccatactgctgccctgcggcgacctgctggagaagttggctatccgcttggtgccggataaggcccacgcggccgataaaacggtggagctggaccagcgcctgctgaccacaccggccgtggcgctggagcgctgccgggtcgtcacctgcgagatggcggaggttgccgtgcgggcgctgcaaaacgccctgcggagctttgaccactacaccgaagcgctggcctccgccatccgggaggatgagagccgctgcgaccactacgaggacgtgctgggcacctatctggtaaagctcagcgcccagaagctgggtgagcaggagagcgaggagtccgcggagctgctgaaggccatcggcgattttgagcgtatctccgaccatgcggtgaacgtgctggagtcggcggaggagctgcgggagaaggggctggccttcagcgacgaggcgaagcgggagctgagcgtgatgtccgccgcggtcaacgatatcctcatgcgggcgctggacgccttccgggagcaggatatgaccgccgcccggcaggtggagccgctggagcaggtcatcgacgatctgaaggagcagctgcgtacccgacatatcctgcggatgcagcaaggccagtgcagcatcgaggcaggctttgtctggtccgacctgctgacggatctggagcgtacctcggaccactgctccaatatcgccgggtgcgtgatcgacgccgcccaccacgatctgaatatgcacgccacgctggatgcggcgcggcgccgggacccgaacttccgggagcagtaccaacgctgcgcggcgaaatatcaggtgtaaacaaaagaagtccctcccgccgggagggacttcttcttgtgcgcttacagcccgcgggaggcgcgctcccgcgcctcggcctccgcccgctggcggcagacctccacccagtcgggcagcttgtccagctcggcggcaaaggctgccagttcatcgggaatgacgatcttctgggggcagacagcggtgcaggcgccgcagcccagacaggcgtgaggccacttgttcgcgggcaccgcgtccagctgcatcttgatggtgctgccgctgccggtgcggagctggttgtacttgtgcagcagatccgggatatccaactgctggggacagccgtcacagcagtagcggcaggcagtgcaggggatggaattcttcatcttatccgccgcagcaaagaggatcgcctcctcagcgggggagagggggtcgaggtgctcgaaggtggccacattatccgccatctgcgccatgtcggacataccggagaggaccatgtggacgttatccagtccctggagccagcggaagccgaaggaggcgatgctggcgttggggcgaagggcgtggagctgctgttcactgtcggcatccagggcggccagcttgccgccgcggaccggctccatgacccagacggggatatggtgcttttccagcagctcgtatttctccctggcccgctggatggtccagtccagatagttcagctggatctgacagaactccatctccctgccatagcgctccagaaaagcggtgaggcagggaaggtccgcgtgggtggaaaagcccaggtgcttgatgcggcccaggcgcttctgctccacaaaatagtcgatgatgccccaccggggatcggtgtagatatccacgtcgttttcatagacgttgtgcagcaggtagaaatcgaagtagtccacctgacacttctccagctgctgggcaaagatgtccgccgggtccgggtcgcaggtgagcatatggccggggtatttggtggccaggtagaagctgtcccggggatgctttttcaggcagcggcccaccaccgtctcggacagattttgcatatagggccaggcggtgtcgaaataattgacgccgtgggccagcgcatagtccaccatcgcctgggtggtgtcctcgtcgatggtgccgtccgccgtggtgggcaggcgcatggtgccgaagcccagcagggacaggtgcaggtcctgaaaatcacgatagatcatggcattgccctccttttttgtggtgctattttaccgcgaaaaatgccggagcgcaagagtggaattggccgtgcagtacgcctgcgccgccgctgcacccgggagagggcctgcggcgtgatggagacggtcctgggcgacagactgcaccagctgaagtgcggactggagatgaccttctgaaaaacagaccacccccggctcctcgccgggggtggttttgcttgctcagggcagcagtgttttctccaggaagtcgtaaacggcctcggcggtctggtggacggagtccagcaggacgtattcgtcgctgctgtgatagttctcgccgtcggcgccgaagatgatggccggcgcgcccagccgtgtgcccaggtagttgaaatcgccgatgctggcgaagtaggagatggtgggttccttgccggtgaccttgcggatggactccagcagggagacggtcatgggttcgtcctgggggacggtgtagggcatgaagccccgggagccctcggacggcgcctcgcggaagcagatctcataccgcccggtgataccggcgcgctgcacggccttttcgatctcgcggacgatggtgtccgggctttcgcccaccacgatgtgccagaacaggtggagcacggcgaagtccggcacgctgcacgcgccgccgtcggcgttgatgcccaccacgcagcaggtgcccttgcccaggtgcgggtcctcaacatagtccacctgctccagggcctgcgccaccttggccgcgtccagcagggcgctgtggcccttttccgggttggccgcgtgggcggactttccgtagaagcggatctccagaccatagccgccccgggcacccaggcagacatcggggaagggcttgccgtcaaagccggcgcttggctcggtgatgatggagaagtccacgtcggagagatagccgtcctcgatgagggcattggtgcccaggccgtaggggccctcctcgtcagagaccagcgccagcttgatcttcccggcgaaggtcttatgggcggcggcgaagcgggcggccgtgaccatcagcgcggcgcagccggatttcatgtccagcgcgcccacaccatagagcctgtcgccgtccagctcgccgtagggatcgcgggtccaaccgccgcacagctgcacggtgtccagatggccgttcaggcagatgaccggtccgggtctgccgccgtcgataacggcgatgacattttttccatggaaatctgtgaccttggcatcgtggtattcgtgcagctgtgcgggcagtccctgccggcacagccaatccctggcgaaggccatgatctcgtcctcatggaaatattcgcttttgatggccgtgagctgctgcaaaagtgctgtgacctcagctttttctatcatcagtatgatcgctcctttctgctgtggggccggaaatatgcgctttctccgtacagtatagcgggcaggcgtttaacgcctgttggtccgggcgtttttcacttattgctccacgcgccacagcgcgccgaagtaccacgcacccatgccgtcggacaccacgccggtcacgtcgccgcgcagggcgtaggcctgccccttctcatacagcggtatcacgttggccgtgtccagcagcagccactccgcatccttcaaataggcgtcccgcgcctcggcggaggtgctggccgccgccacccgcatcagaatgttataggcgttcatgtagatcagcgcgtagttccgcgtgtcgccgctgcgccacaggtccagataggctgatgcatcgttgtacagcgcgtccagctccgtcagggccagggtgaacgcgccgctgctgagcagctgctgatacgtctccgcatcctcaccctgcagggtcacgctcagtcccagtttttcctgccacaccttctgcagccgctgggccagtgccgtctgcgccggcgtattccggtacagcagcgtcaccgtccccaggcttatcagcgcctccggccgccgcaggcccgcctgcgtcatcagctccagcgcctgactgcaccggtccgtgtaggtatccgcctcgcagtcgatcaccgcgccgttgaccgcccggaactcctcgcctccggcggtgcgtatgccgtggggcaccagcccctccgcggcggcatagtccgcgcccagagcgccggccgccgcatcccggtcgatgaccagactcatggcctgccgcagctccgtccggtccatgttggtggccatctggttgatgagcagcacgcccacggtgctgctgccgccgtaggtgccgtcctctcctgccgcgccgatgaccgcgtccgcggtgcccgcgtccttggcggcctccgccgcgctcttgaaccggatctcgatccggtccgcgcgcacctgccgcgcgttatagtggtcctcctgcttcaccagcgtggcgaagagactgtcgctccagtcgccggtgcggcggtacggcccgttgcccacgaaccacgtccggctggcgctccagccctcgccgccttccacagccttctgctgcaccggcatggtggccgccgctgtgcacaccgcgtccacaaagtacgggcacatcgtgctcagcgtcaccacgaaggtgtgctcgtcctcggcgtatacgcccagcgcctccgggtcgcccgcgtgggcgtcctcatagcccgccaccatggacaggatatccgcctcctggctgtccgtctccggtgctgtcagccgccgccaggcgtacacgaaatcctctgccgtcacgtcgctgccgtcggaccacttgccgtcgcgccgcaggtggaacgtgtacgtctgcgtgccgtcctcgttgtccgtgcagtcgtaggcgtgggccgctgcgggcaccgcgccctccgccgtccagcggtacaggttgtcgaacaggtgcagcaccagggtgcgctccgcctgtgtggcggcataggccgggtccaccgtggacacgctgccggtcatcaccaccgacgcggtgctctcgccgctgcggccgcggccgcagccggccagcagcgccgccatcatacacaggcacagcagcatggccgcgccccgcttccatcgtttcataggacttcctccgggaatagacttttccccattatatatggttttgcgccaaaagtaaagccgccctccgggcggcctcactttgtttacaattactccgcgatcagcagctgggcgatctgcacggcgttggtggccgcgcccttgcgtacctggtcgccgcagcaccagatgttcagcccgttgtcgctggtcaggtcgtcccggatacggcccacgaacaccaggtcctggtcgctggtctccagcggcatgggatagcgcttgttggccaggtcgtccaccagccggcagccgggggcggcggcgatcagctcccgggcgcgctccacgctgattttctccttggtccgcaccacgatggacacgctgtggctccgtaccacaggaacgcggacgcaggtgcagctgaccttcagctccggcaggtgcatgatcttccggccctcgttctgcatcttcatctcttcggaggtatagccctcaaaggcctcgccgccgatctgggggatgacgttgtaggcgatctggtactggaacaccttgggctccaccggcttgccctcccgcagcagctccacctcgtccatcagctcgatggggccgccggcgccggcgccggacaccgcctggtagctgctggccacgatgctctcgatggggctgtcgtggttcagggcgttgatggccaccagcgaaacgatggtggtgcagttggggttggagatgatgcccttgtgcttcttcacgtcctccggattgatctccggcacgatcaggggcacatccgggtccatgcggaaggcgctggagttatccacgaacaccgcgcccgccttgacgatggccggggcgaactgcttggcgatgtcgttctccgccgcgcccagcacgatgtccatgcccctgaaggcctcgtcacaggccagctccacggggaggtcgtggcccttccagtggacagcctgtcccacggaccgggccgacgccagcaggtgcagctcctcgatggggaaatcgcgctcggccagtaccttcatcatctcgcggcccaccgcgccggtggcgcccagaatagcaactttatactttttcatatgatgtactccttttctcgatatcgaataagtgacgtatcctgcgttcagatgcggcgcatggcgcaggcgcaccttgtgtacggcaagccgctgcggcgaagtatgggcgcaggagacgcactttattttacaaaactgttgtacagcacccggatagccttctcaaagtcggcgctgtccacgcccacgatgatgttcagctcttcgggcccctgggtgatcatgcggatattgatgccgttttcgcccagcttggcgaagatcttgccggaggaaccgggctggaaggccatcttccggcccacggccgccaccacggccataccgtcggtaacgtgcaggctgtcgggcttgatctccttctccatgtcgcccagtgcctgatacagatacggcgcggccttggccgcctccaccaccagcgataccgagtcgataccggaggggatgtactccacgttgatgtgatagcgctccaatatctccagcacccggcggataacgcccagctccgaggacattccgttcttggtcatggtgatgacggaaaagcccttctttccggcgatgccggtgatcatgctgctctcctgcagctccgccgccgtgtcgtcgaaggcctcccgtatcatggtgcccgggtgctccggctggttggtgttgcggatgttcagggggatgttcttctcccgcaccggggagacggtgccttcatgcagcacctgcgcgccgatgtagctcagctcacgcagctcggcgtaggtaatgcgctcgatgggccgcgggtcggttacgatcttggggtcggccatcaggaagccggacacgtccgtccagttctcatacacgtcggcgtccagcgccgccgccgccagcgcaccggtgatgtcgctgccgccccggctgaaggtgtggatgctgccgtccggcagcacgccgtagaagccgggaatgactaccttccgcccgctggccgcatggaccagagcctgatagctggcctcctggtccaccgtgccgtccatgcggaagtgcagccacaggctgctgtccagaaagtcaaagcccaggcagtcggccatgatccgggcagcgaaatactcgccccggctcaccagctcatcggcggagatgcccttgtccatcttggcgcgcagggcgtcgaattccgcctccagcggcgtggacaggcccagctcgtcccgaatctccagataccggctgcgtaccatatcgaatataccgtcgcagctgacgccgtactgcaggtgggcgtggcacagatacagcaggtccgtgatcttgtggtcgtccttgaaccgttttccggcggcgctgaccaccaccacccggcgggcggggtctgcctccacgatggagcgtactttttccagctggtgggcatccgccatggacgacccgccgaatttcaacactttcaacatagtccttgcctctttcgctttggttattgtgtgcagggtttttcatgcgcgacaaaaaaatattttatgtccatgagggaaaaacacttgcttttttgatggggacagtgtatcatagccatatcagaaatgcaagacccaatttcaaaagttttttcggaggctttttaccatgatctaccacagcacaagaaacgagcagctcaccgcttcctccacccacgcggtgctccagggcatcgccccggacggcggcctgtacatctgcgacccggcggccctgcgcttcgactggcgcgccgccctggaaaaggacaccctctccatggcggcggatatcctccacgccctgctgccggactttcaggacatggaccggctggtccgcgacagctacgccggcaagttccccacgtccgacctgacgcccttgacccccgtggcggataaatacgtgctggagctgtaccatggccccacctccgccttcaaggatgtggccctcagcgtcctgccccgcctcatcgtggcggcggccaaggctgagggcatgaagggcgacgtggtcatcctgacggccacctccggcgacaccggcaaggcggccatggagggcttccacgatgtgcccggcacccgcatcactgtgttctacccctatggcggcgtctccgccgttcagcaggcccagatggccacccaggagggcgccaacgtccgcgtctgcgccgtccgcggcaacttcgacgacgcccagaccggcgtgaaggagatcttcgccgcctgcaaggacaaggacctccacggcgccatgctctcctccgccaactccattaatatcggccgtctggccccccaggtggtctattacttccgcgcctacggcgatctggtgaagtccggccgcatccggctgggcgacgtggtggactacaccgtccccaccggcaacttcggcgacattctggccggctattttgccaggcagatgggcctgcctgtgggccgcctgatctgcgccagcaacgccaacgacgtactcaccgagttcctgaccaccggccgctacgacaagcgccgccccttctacaagaccacctccccctccatggatatcctggtgtccagcaatctcgagcgtctgctctatctggtcagccaggatgccagctgcgtggagcgcctgatgcgtgagctgaacacccagggctggtatcaggtcagcggctggatgctggagaggctccgcgccgtcttcggctgcggctgctgcgacgatgccggcgcggcggaggtcatcggtcgggtgtggcgtgagcacaagtacctctgcgacccccacaccgccgtggcctgggccgtagcggagaagcatacccgcgagggcgtccccatggtggtcctgtccaccgcctcgccctacaagttccccgccgccgtgctgcacgccctgggcgaggcatccggtgacgatgagttcgccatgatggagcagctccacgccctcaccggcatggacatccccaaaaatctccgcggcctggagggccgccccgtcctccataccgacgtcatcgacaaggacgccatgctggactatgtgctgtccgacgtgctgaaataaaagaaaggaaccgttccctatgaatatcgtttgtttggacatggagggtgtcctcgtccccgagatctggatcgcctttgccgaggaaagcggcattcccgagctgcgccgcaccactcgcgatgagccggattatgacaaactcatgcgctggcgcatcgatctgctgcggcagcgcggcctgaagctcagcgccattcaggagaccatctcccgcatcgcccccctgcccggcgccaaggacttcctggacgcgctgcgtaaggacactcaggtggtcatcctcagcgacaccttcgaccagttcgccatgcccctcatggccaagctgggctatcccaccctgctgtgcaacaccctcgaggtggacggcgagggctacatcacccgccacctcatgcgctgtgaacactccaagctcaccaccgtcaaggcccttcagtctatcggctacgacaccatcgccagcggcgacagctataacgatttggagatgatcctccacagcaaggccggctttctcttccgcggtcccgacaagatcaagcaggactaccccgacctgcccgccttcgaggactacggcgacctgctggccgccatccgcgccgccctgtaacagcagtgctgcggtgaaagacaaagcaaaaaccggcgccccccggcgccggtttttgctttgtgaaaggagggggtaagatcacatctggacgcggttctcgcgggtccagctggtgatgtccaggttgggatagcggcggcgcagctcgtccagcttgccttcggtgtcgcccagtgcggcgatgctgttgatggccgccacatcggcggcgttcatggcgtgggcctcatcggcgccgcaggacgcgcagtgatagtgcttggtcgcctcggaaaacgtaacatcggtgctgccgcagacggcgcagcgggtggtcttggatacgatagccataacttattacctccatattgttgttttgtttcattgtccttatactaccacaaaagttttcagttgtaaaacgcataattgtatttgcaagtatgagaaaaagtatgatataatagcgacagcgactgtacaggaggtcccgccatgagcgtatccaaataccagatgttcctcaagaccgtggagtgcggcagcttctcccgggcggcggaggagctgaacttcacccagtccggcgtcagccacgccgtccaggcgctggaggacgagctgggaatcacgctgctcagccgcaaccgcggcggcgtggtgctgacggctgacggccgcgcgctgctgccccgggtcgaggccctctgcgccgcccaccatgccctcatgcagtccgcggcggacctgaagggcctggacgccggtctggtcaaggtggccaccttctccagcgtctccgcccagtggctcccctccatcctcaaaagcttcggcgacgtctaccccaacatcgagttcgaggtggtggatgccgatttctacggccagaccgaggagtggatcctccagggcaaggtagactgcggcttcctgcgcctgccctcagcaaaatccctctgcgcccaccccctgtaccgggatgagctgttggtggtcgtcccctgcggccacccgttggcggacgcggcggcttttcccctgtcggccctgtccgccgagcccttcatccgtctggaggagggccgcgactatgagcttaccgccgccctggacgccatgggcgtccaccccaacgtgaaatacaccgcccgcgaggaccgcaccatcctggccatggtgtccaagggcctgggcatcagcctcctgccggagctgatggtccgccgcagcccctatcccgtggccgcctgccacgcccccgagcgcttctaccgcaacatcggcatcgccgtcaaggatgaaaaggcccagtccgcctccacccgccgcttcgtggactacgtccgccgctgggtggccgaaaacggcgagaactgacctcccacgccttccccctgggagcggatgaggtgtccccgcccgcaggcggcgtaaaactcccccgtccccgccgtagcagagggcgtgctgaaattcgagatcatggccggctgacacgaggccggagcagcaaaagcagggagcgaaacgctccctgcttttctatcttatcaaacttgcttacttgccgaagtagcggttcagcagaccctcgaaggccttgccgtggcgggcttcgtcgcgggccatctcgtggacggtgtcgtggatggcgtccaggttgtacttcttggccagcttcgccagctcgaacttgccggcggtcgcgccgttctcggcatccacgcgcatctccaggtttttcttggtgctgtcagtgatgacctcgcccagcagctcggcgaacttggcggcgtgctcggcctcctccaggccggccttctcccagtacaggccgatctcgggatagccctcgcggtgggccacacgggccatggccagatacataccgacctcggagcactcgccctcgaagttggcgcgcagaccgtcgatgatctccttgcggacatcctcggggacatcgtcgccaaagaccttgcctacgcccacgatgtgctcggcggcccaggacttctcctcagactgcagcaggaacttgtcgccgctgacgtggcagaccgggcactcggcggggggaacatcaccctcgtgaacataaccgcaaacaggacagacccacttcttcataatcgttacctccataaatgtattcatgtcgttgtgtttgttattttgacgccgccgcagcggcatttgtcaactggttttcttctcggccaggcagccgttgcagcggccgtagaacacgacgccgcagctgtccgcctcgcccacagctgtcatatccggcagctccaccgggatgggcggcaggtcgatgaccgcgccgcaggtgcggcagacgaagtgcccgtggggggcggtgtcaccgtcgtagcgatcctcgccgtccacacagccgatgacctgcaccgcgccctccgcccggaaccgcgccagattgcggtagacggtggccagagagaggtcgggtatgcggggcttcagctggctgtacacccactccgccgatgggtggcaggtggtggagcgcaggcattgcagtatggcgtcccgcttggggctgtaccgtgtgttatccatctgcggcgctcctttcttgttgctaacaattatcgttttcattagtatagtagcacacccgtttggatttgtaaagaggttttttgcatttttttaaaaaaattttccagtgcctgttagcctcccctatcggtgcggaaaatatgcaaaggagcccggtacgcacagcgtaccgggctcctcatttcaatttactcggcctcggccagcgccttagcctcggcaatagccttctcctgcgccgcggcggggcaatcctcgtagcggacgaagttgaaggtgaacgtaccgcgggactgggtcatggatcgcagatcgatggcgtagctcatcatctcggccatggggacctcagcctccagcacctgctcgccgtcaccggtggggttcatgcccatcacacggccgcggcgcttattcagatcgcccatcacatcgcccagatagctgtcggggatggtgaccttcagctcaccaatgggctccatcagcacgggcttggcctcgggcagcgcggccttgaaggccaggttggcagccagcttgaacgcgatttcggaggagtcaacggggtggtaggaaccatccaccagggtggccttcaggaacaccacgggatagccggccagcacgccgtgcaggcagctctcgcgcaggcccttttccacggcggggaagtagttcttgggcacggagccgccaaacacgttctcctcgaagatcatatcctcctgctcagtctggggctcgaaaatgatatggacatcgccgaactgaccgctgccgccggtctgcttcttatagcggccctgcttgcggacggtgctgcggatcttctcgcgataggccacgcggggagtatccagctccgcgtccacgccgaagcggctcttcagcttactgcacagcacgtcgatctggatgtcgccggcgccggagatcacggtctgatgggtctcggcgttgttggtgacggagaaggtgggatcctcctcgttcagcttgttcaggccggtgcccagcttctcgatctcctgcttggtcttgggggagatggcgcgctcgtagcaggcgggggcaaaggccagcggcgcgaacttcacataggtcttgggctcgcacagggtgtcgccggtcttgaccttgtccatcttgccgatggcgccgatgtcgccgcagcagatctccttggtctcctcggccttcttgcccttcatggtgtacaggcggcccagcttctcggtgttgccggtggtcatgttatacagggacatatcgctggtgaccttgccgcggatgaccttgatcatggagaacttgccgtactggtcggagatggtcttgaacacgaaggcagcggtggggccgttggggtcataggcgacctcgatggcgttgccgtcatcgtcctcggcggcctcggcgggcatatcggtggccacgggcaccagatccacgatggtctgcatcagcatatccacgcccataccggtaacggcggagccgcacagcacggggcacacgctgccgtcgcgcacaccgatcttcaggcccttggccatatcctcggcggacagctccatggtctcgaagaacttctccatcagctcctcgtcggcgccggcggcggcctccatcagctcagcgcgcagggcctccacctcgtcggccatgtcgccggggatggcgcactcgcccttggcgtcgtaagccttgttgtgcagcaggtccacgatgacggtgacagccttgttggcgtcggccttggtggccacgatgggggcgatggcggtgccgtacttggccttgatggcctcaatgcaggacgcgtagtcggagttggcctcctccacgcggttgatgaacatcatccggggcttcttgcccagcatcttccaggtacgctccatacccacggacaggccgtccttggcattgcccacgatgacggcgcactcggcggcgcggatggcgcacacggcctcgccggagaaatcgaagttgccgggggcgtccatgacgttgatcttcttgcccttatactgcacgggggcaaaggccagggagatggatatctggcgcttgatctcctcggcatcatagtcgcaggtggtgttgccgtcggcggtcttgcccagacggtcagtacccttggtcataaacagcatctgctcagccagagaggtcttgccggagcctccgtgacccagcagggcgatattgcgaatgtcgttagcagtcatagtgatgatgttctcccttcattttcttgaagtccgccgcccacagccgcggacagtagctcaacgtaccgattatatagtatttcttcaagcctgacaacctctaatttagatatttgtgggaaaagtgcgggagtatcccgcacttttcgtcactttgtacaaccaacggtgtcattctctgttcatctcgccaatgtcccgcggcgcatataccgttacgaccgtcccgccgtcctgtatccatatatcctccggcaggcggcgcagccttcggtgcatatacagggtcattcccatcaggcttatattgttcatctgccagaaccacgccacccagaaccagcttcgcggcagcgccagcgccgccaacaggatcaccgcaaaaagtatcgccggcgcggtcagggtgtaccgcgcatatgccccacggctgaaatatccgtcacagcccaccgtacagaccaaccctttggtaatgccgaaattcgtcttttccgccccgcaccaacgcatggcggccgcggccagcagacaggtcagcacgatcacggcgaccccacccaggcccgcggcgagcagccgcaggagcacggacagcagcgctgccaaatccgtatgatcaaagcgtatcagctccgacaacggcacgacaagacagccgacacctaccgtggccgccatcagcagtacggagaggatatctccccacaccctcactcttttgtcgttctttatatcgatgacatcgacttcccgataccccgccggcagtgttgtcctgtacttttccatatgtgcgcttccctttctgccattagcgaactatctccccacatcggagagatcttccgtcctgccgatgacagaccggcgacggcgtatcgggtatacgtcgagaagggctggcgcaggcagggcacaaaattcccccgggatcaatagtgcttcaccagccccgccagcaatagcgtcggcagcagccacagcacctgatacagcaccatggcaatgggcgtcagcagggcgaaatttcccacagaggtgagatagtaggccagcgccacgcctgccgccgcgccgatgtagctaaggagggtggcggtccgtacagccttcaccgcccggcggctcccggccacagactccaccagcggcatgagcccctcccggcagatggccacgcagggctgctcgccctgctgctccgccagctgggccagcgccagccgcgtggacacgtccggatacaccggcttggcatccacgccgaatttccgcttgatcagccccggtgtcacgttgccgcttcgcacggccagcaccggcacgatgtgaaaccgcttcagcgtccgcagggcccattccgcgttgcgggagggctgatatttcacggcaaacaccgctgtcagcgccccgtctaccgccagaaacacgccggtagacagcttcatatcccggggcagggccaccttgcgctttttcataaagtacgcactgcccatgagcaccgtttcgccccggatattggcctccacgccgccctcctcgcagtagttcacccactccaccggcaggcggaagccgccctcggcggtgagctggcgctccagcagcggcgtcaggctgctgtccgccgccctggctaccgacgcggcgtaggacaccgcgcggctgcgctcctcgccgaagaccttatagccgttcagtgtcaccgttcccgccgggaacagatcatcgtccgtcagcaccagccgccgcggccggctgaccgccttcgccccggcatagcctgcggcggcgcaaccgctgcggctcagccgccgggacagatagtacatgggcagggccccgctgagggggatccccagccccgcgccggcggtggtcagcgccgtcagcacccaggggaaatcgctcatattcccgccggaaaagcacaccacgccggacagcaccgccgccgtggccagcaccagcggcagggcgtaattctgccatctccgcgccggatcgggcttgctgcacagacggtaaaagccctctgccgtcccctgctgcctgcatacgcccgccgccgtcaccgacgccacatagggcacggtgccgttgagcaccagcaggtgataggcgttccgcagtgccgacgcctccaggtacagcccccactggcaggccaggatcagcagcgcgccggcggcggcatagggtgtggcccgggtactgcccgtgaccatgccgcacacacagcagatcagctgcgtcagcacggcgacagcggcacacagttcacagcccgcccttccctcacgcagcagcgacacggcctgcttccacaccggcatacaggccagcgccgtcagcaacagccccgcccccagggcggcgcaccgcagcagcgactcgtccagccatgccgacggcagcttttccagctcctgcagcaccgccgcggccaccagtgccagtgccgggagcatcccccatatcagtccgccgcgcagccggctgcaccggcgcttggcatcccgcagcacgtcctccggcaggggctccggctccggtggttcctccggctccggttcctcctccggctcgtcgaacagctgctcggtgtcctgaaaagccggacggcgcttctgctccgctgccggacggcgaagcctctccagcagtgccgcaaagcgttcccgcaggggcaccggctgggcgatgacgccgtcatcctcgtcctccagcaccgcgtccaccgtctgggacatgatatccttcaacgccacccgatccggcgcgggggcctcgtattccggctcgtttttctccggggcagcgggctccgacggagcctccgtctcagatggcggtactgcctccgataccggcacgggagccctttcctctgtcggcgtcttcggtatcgccgcttcctccgtcgggacaggctgacgcccacccttgccgtactcggcaagaatggcctccagtgaaagctcgtcctcctgctcgtcgaacgcgccgtatagctcctcgtcccgtcgccttctcatgctgttctttcctgttttcttcctgttctgcgtcgctttccgttatccccgctgccgcacagcctcgtacagcagtatggccgccgccgcgctggcgttcagtgaggatatctttcctttcatggggatgctcaccagaaaatcgcaattctccgccgccaggcgggtcatgcccgtcccctcggagccgatgacaatggccgccggccccttcagatcggcattgtacagcgtggtattcccgtccgccgccgtgccgaacacccacacgccctgctttttcaggtccttcagcagcgccgggatgttgggcacccgcgccaccgggatatagctcaccgcgccggcggaggtctttgccacgatggccgtcagccccgcgctgcgccgcttgggaatgacgaccccatgggccccggcgcactcggcggtacgcaggatcgcgcccaggttgtgggggtcggatatctcgtcgcacaccaccagcagcggcgcctcgcccttgtcggcggcggactgcaggatctgctccaccgtggcgtactcccgcacggccgccagagcgatgaccccctggtgggcatgggtgcggctcatggcgtccagcttccgccggtcggcgtccaccaccacgatacccgcggcgcgggccttggaggcgatgtgccccagcgtcttatccgtctcgcccttggcgatgtaaattttatcgatggccgtctccgtccgcagggcctcgatgaccgcgttgcggccctcgatgatgccgtccgcctcggcgtcgggcagcggccgtctgttctcggtgtcctttatctctctcatggggcatacctcgcgatccatataattgtcaccagtataccacatcctttcgtcaatataaaggcacattcatagaaattttacaggaaaaccctctgcctttgccttgagactttcgggcaggtgtggtatactgattagaaattatattcccctcacaagtcaaacggaggataaatatatggccaataacaacagcagcaacaataacaaccgcggcggcaagaacggcaaaaacggcggtttccgcggcgttctcacgctgatcgcgtgggcactggtgctgacggtggcgttccagtatttcaacgcctacaacaacaacgccgccaataagagcaccagtcacgagatcaaatacagcgacatgatctccatgatcgaaaaggatcaggtgaaggagatcctgttcaaggacagcaccatctacgtcacccccgtggacggctacgtcttcaccgaggaggtcacttccggcagcaagacggagacaaaaacctacacccagtccaaggactccggcctgacgctgtacaccgtgtacctctccaacgccgacctgctccccctgctggaggagcacaatgtggcctataccggcttctatgaggccgagatgagccccttcctgatgatcatgatccagtatattctgcccaccatcttcatcgtgggcgcgttcatgctggtcatgcgtctgatgagcaaatccggaggcggcggcttcggcggcatcggcagtgtgggcaaggccaatgccaaggtctacatggagaagtccaccggcgtcactttcaaggatgtggccggtcaggacgaggccaaggagtcgctggaggagatcatcgacttccttcacaatcccggcaaatacaccgccatcggtgccaagctgcctaagggcgcgctgctggtgggttcccccggcaccggcaagaccctgctggccaaggctgtggccggcgaggccggcgtccccttcttctccatctctggttccgacttcgtggagatgttcgttggcgtgggcgccagccgcgtccgcgacctgttcaaggaggccgccaaggtcgctccctgcattatcttcatcgatgagatcgacaccatcggcaaatcccgcgatggcagccgctttggcggcaacgatgagcgcgagcagacgctgaaccagctgctggccgagctggacggctttgaccccagcaagggcgtcatcgtgctgggcgccaccaaccgccccgaggtactggacaaggcgctgctgcgccccggccgcttcgaccggcgcatcaccgtggaccggcccaacctggccggccgtctggccaccttgcaggtacacacccgcaatatccgcctggccgaggacgtgaacctggaaaagatcgcccaggccaccgccggctgcgtgggcgccgacctggccaatctggtgaacgaggccgccctgcgtgccgtgcgcaagggccgccgggccgtaaatcaggacgatctgctggtgtcctttgagctggtcatcgccggcagcgagaaaaagggcaccgtcatcaccgaggcggaaaagcgcattatcgcttaccacgaggtgggccacgcgctggtggcggccaagcagaagaatgcccagcccgtcagcaagatcaccatcgtcccccacacccagggtgcgctgggctacaccctgcacctgccggaggaggaaaagttcctcatgtcccgcgaggacattctgaccgagatccgtaccctgctggccggacgctccagtgaggaggtggtgtgcaacaccatgacctccggcgccgccaacgacatcgagcgcgccacggagatggcccggaacctggtggcacgcttcggtatgtgcgacgagttcgacatgatggccctgggcagcgtccagagccagtatctggacggcggctactccatgacctgcgcccaggagacctacgccgcagccgaccgcgagaccatcaagatcctgcgccagtgccacgaggaggccaagcagatccttcgggaaaaccgggagctgctggataagatcgccgcctatctgctgaagaaggagacgatcaccggccaggagatgatggccatcatcgagggccgtgacccggagaccgtggacaactacggcgccagcaagagcagccagcccgccttccggcccagcgtaccggagaccatcgaggcccccgccagacacatcaacatcgtgtccgagcccatccccatgccgaactacgatgagaagccggaggataaggacccggaaggcacccccgccgaagacaaaccggcggagcacgcggacggcgaccccgaataaatgcacagcagccctgcggcagcgccgcagggctgttttctttttcagttttccggcaggtcccgcacccgttcgcacagcagcggcagcgccttttcaaactccacgccgtaccacccggcctgcgggtcccgcgccgtggcgtcgatacaggccagcacaaattccaccgccagcgaagccgcctgctccagcgtcatgccccgcatgagcccgccggtgacaacggcggcaaaaatatcccccgtgccgtggaaggaggccgggttccgcgggccgagacaggtaaaatatgtctccgcgccgctgtcatagcccatagcgcccagcttatccggcgcaaaggacaccccggtgaggatcaccttcttcgcccccagcgcggccaccccccgcagcagctcacgggcaaagccctcgtccacctcctcccggtaaagtgtaccggtcagcagacaggcctccgtgatattgggcagcgccacgtccgcccgagccgtcaggcgggccatcgccgccgggaaagcgccgtcaaacccgctgtacagcttcccgtggtccgccatggccgggtccacgatcagcagcgtatccgggctcttcaccgcgtcgaaaaaatccatcacctgctgcacctggggcgcggaggcgatgtaaccggtatagagcgcgtcaaaatgcacctgctgggaccgccagtgatcggcgatggccggcagctggtcgctgagatcccggctgacaaagcccgggaatgccgtgtgggcgctgagcaccgccgtgggcacgatggcgcactccacccccatggcggagatcaccggcagcgccaccgtcagcgagcaccgccccagacaggaaatgtcctgtatggacgctattcgtttcatagagccgcctcctgttcatcataccaaaaagggagaggcacatgaatatgtgtctttccctttttggtgcgggcggcgggactcgaacccgcacgcctgttggcaatggaacctaaatccatcgagtctaccaattccaccacgcccgcatatccacgccgtattgtagcacacttcacgtcggcgtgcaaggaatgttttgcctttcccctccaccctatgctatactgtcatcaacagtacacgaaaggatggtgccccatgagcgaaaatgccctcgccttggcgcgtcagcacgcgccctgctacatttactcccgcgagatccttaccgcacaggcagagactctccacaggaccttccccggctttgatattctgttctccgtgaaggccaaccccttcccaccggtaatacggcaccttgcggcgcttggcatcggcgcggatgcggccagtgcgggtgaggtctgcctggccgcggaatgcgggatcgcgcaggaggatatctacttctccgccgccggaaaaagtgatcgtgcactggccgccgcgtgggataactgccatctgatcgccgattctatcggcgaggtgcggcgaatcgccgctatggccgctgcccgcggcgagacaaagaccatcggcctgcgcgtgaaccccgctttcagtatggacggcagtacgggcggaacgtccaagttcggcatcgacgagtccgatctcccggcactgaaaatcctgctgcaaacgctgccggtagccgtctgcggcctccatattcacctgcgctcccagaacctctccgcggacactctcgcccgctactacaaaaattgcttcgcgctggccctccgcgtccgcgatattctggactgtgccatcgagtatatcaacttcggcggcggagtaggcatcgtttacgacccggcgtgccaaccgccgctgaacatgagcaccttgaagcaatgtgcacaggccgtagcagaggaaaacgcccgtaccctccgcgcacggctgctggtggagtccgggcggtttctgacagcacaggcgggaacgtactatctgcctgtggtagacaaaaagacgtcccacggcaccacctatgtcatcgtagaaaactgtctcaacggcttccagaagccctctcttgccgccatgctgcgtaacgccgccggagaaggcccccttgcgcctcaggaacctctgtttaccggcgagacctccttccccatcaccgccctgcctgcggaggataccggcatcaccgagaccgtagacatcgtaggaaacctctgctgcgccgcggacgtgctggctaagaacttcaccggtccggcgctggcggtgggagatcttgtggccgtggggaacaccggggcctacgccagaacactgtcgccgctgctgttttcctcccacgacgtccctgcggaattcttgatctgaaaaacagggcagcccgttgggctgccctgttttcttatttctcccgtctgatgggccggatatacttgaagtactgccccggcacaaaatagaaatacgtcttgacgccctgttcacttttgaccataccgatctctcccaatccaaagatatagcgatcgaagggatggatgcgggtgcggagcactacggggcggggccggcggcggtaaacaccgggggtaacgccgtagagcgccttgaaggcgcgggtaaaggcctcctgcccggaaaagccgtagtccagcgcgatgtccagcaaaggccggtcggtatcgcgcacttccttcagggcaaaggccaggcgccgctggtgcaggtaggtacgcagggacatacccgcgatctcgcggaatttatgggtggcgtggtactcagaatagtgcagacgtgccgccagcgcccgcagtgtcaacgcctgatcgtcccggcgcataatggcgtcgtccatctcattgacgacggtctggatcatctgctgccattcgtacataggcttgctcccttctctcgctgtgaacagaatacaccctttccgccccaaatgtttgatatgagttgctgttaaaacagggacggctcccgccgtccctgtccgcttattccacttcagcagcctccgccggctcctcctgcccctgcttgggcagctgctcgggccacttggcccaggtctggcggatataggggatcatctgatcccggggcatatccagtgccgcggccagctcgccgtagagctggtcctcagcccgcttgagatagcgctcatccatctggctgaccttcttaccatggcgcagggcccacgcccgcttgcggcagataccgtggatcatggcggccagctcggcgcagtcacagcggagcaccagctggtggtagaaatccttggcagcacgcataccgcgctcggcgggcttctgctccggcagggccggcagcgcagcgatcagctccagcgcacagtctcggctgatgatggggcgcatgaggacagtggtgtccacaggagtcataacggtgccgccgcggtacaggggagagagatgatagtagaccttgtcgccgccgtcataggccagaccggatggccctatggactccacccggcagacgccctcgccgccgtataccaccagatcacccgctgcaaacatcacacacgctccttatccgcaacatacatacacatatatacacaaaaaggcacatggcacacgaccatgcgttccccttttgctcaccattacctgacatcagtataacatattctgacgaaaaatgtaagcacaaattttaccgtgactgtcgattttcccggaaagttgtgatacaatgcaggaaaacttttgcgaggtgcagccatgaaaaaacctgtcatccatccctccgcctttgtggcggacaacgccaccgtccggggcagcgtgaccctgggcgccaacagcagcgtgttcttcggcgcggtgctgcggggcgaccgggcgccgatcaccatcggtgcgggcacgaatatccaggataactgtgtggtgcacgtggactacgaccatccggtgacggtgggcgaaaacgtaacggtgggccacggggccattctccatgggtgcaccgtgggtgacaacaccctcatcggcatgggcgccatcgtgctgaacggcgcgaaggtcggcagcaactgcctgatcggcgcgggggcgctggtaccgcagaacgtggagataccggacgggtctttggccttcggctcccccgccaagatcaaaggccagctggacgaagcagccattgccgagctgcggcaggcggcgctggactaccagaaggaggccatggcatacaaggccgagcaggaacaataaaaatatgcgctccgaccaagagccggtgcgcatggatgaaaagcggcccccggcacagccgggggccgctgaccgtttagacgacggcaaagaacttgatgataaacagcagggaaataatgtaggtcaggacagacacatccttggcacggccggagaacaccttgatcacggtgtaggaaatcatggcaataccgattccgtggccgatggagccggagatgggcatggccagcagcatcaggaacacggggaccacctggtccagatcgtcgaaatccacgttcttcaggccctggagcatcaggatgcccacgtagatcagggcggaggaggtagcggcagcgggaatgacggccgccacgggcgcgatgaacatacaggccaggaacatgaacgcggcggtcaggctggtcaggccggtgcggccgccggcctccacgccggaggcggactccacgaaggtggtaacggtggaggtgccgcagcaggcgccggccacggtgcccacggcatcggacagcagggcctccttcatgttgggcatattgccgtccttgtcggtcatgccggcgcgggaggccgtacccaccagggtgccgatggtgtcgaacatatcgatcatgcagaaggtgatgatcaggctgatcgctgtgaaccagccgatattaaagaagtcggtgaagtcaaatttgaacagcgtggtctccaccatgtcgtggaaaggcggcaggaaggacgcgccctccagcgaggcaaaggggttggtacccaggaagataaagcaaccggcccagtagatcacggaggctaccagcatacccaccagcacagcggccttgacgcccttcttggccagcaggatgatgacaaacagaccgatgaacatggtgataacagtcaggaccatctggctgtactcggcacccatgtggtccttgatcacgctgggggtcatggcgccgaagaagtcacgcatgacatagaagggggaggtatagccattgccctcggcatagatgcccacgttggagcccaggccgatgttcatcagcataaggccgatggcgggaccgatacccagacggacgcccagaggaatggcgtgaacgatcttgtcgcggatattgaatacgctcagcagcaggaaaacgataccctccaccagaatgatgcacagcaccgcctggaaggcgctggtgtagtcggtgttcagcatggcggccacattgccggcgatgacggcgaagaagctgttaagtcccatacccggcgccatgacaaagggcttgttggcgaggaaggccatgaccacggtgccgatggcgctggcgatgcaggtggccagaaagacaccgttccacagcggagtgcccacggcaaagttggtcagcaggttggggttcagggcgatgatgtaggccatcgtcatgaacgtggtgagaccggccaggatctccgtcttgacggaggtgccgttctctttcagatgaaagatacgctccatgtgattctctcctttacaaaatgctgcgcgccctccggcgcaagtatcatcttaacgctttttaacaggaaaaacaagactttttgtcaggcctgctgaatttttttcagatgtcagtcaaaaaaagcgcccccggcgtggccgagggcaaggaggtgggggtgcctccttctgttctcagggggctgcgtcagccggggtataactgacacgatgctgatgagatagcagcatggggtgccgaccgggacaggtcagccttccgtccgcatccgggggcgcatgacaggggcgcttttttcagggaagcttattgggccgcgcgatcggcctgaatgagcagcttcagcgcctccacgcccacctgaacggcggaggtagtgtcctcgctcatatcctggtccaagccggccttttcacgctcctggttccagaccacatggaagcagctgccgcagcggcagttcagggcatcggccaccacaaagagggcggcggactccatttcactggccttgacgtgcaggcgcttccaggcctcccatttgttgagcagctcataggataccggcatacgctcggggctgtgctggccatagaacgcgtccttgcactgaacgacgcctacctgggtgcgcttacccagcgccttggccgcctggaccagtgcggtggtgacctcgaagttcgccaccgcggggtactcgatgggggcatattcccggctggtatgctcaaagcggatcgcgccggtggcgaccaccacgtcgccgctgcggacatccagctcgattccgccgcaggtccctacgcggataaacgtgtcagcgccgatgttgtgcagctcctccatggcgatggaggcggagggcccgccgataccggtggagcagacagagaccttctcccccagcagtgtaccggtatagatggtgtactcacggttctgagaaacaaagtgcgcatcgtcgaacagctcggcgatcttggcacagcggccggggtcaccgggaagaataacatagcggcccacgtcgccctcggcgcagtggatatgatactgcttttccagttcctgcatgatacatcgtcctccatctatgttcaagtcgttatgtcctaagcaaataacacggttcataatcaaacatttacccatcgctgaggtagaaaaaatcatatcatggtttttcggaaaatgcaatacttccgccacaaaagatacggctttcctgtacaaatgatgcaaaaggcaaaaagtgtcggggctataaaaccgcccgcggcaaaacctacgtttggcggcggctgttctccgcgcatgtgcgcgtgtttttgcgcggatcggccgacgcatatgggaaaaggaggaaaaagatatgacagatcgactcgctgcactggcggcggcagtgatgctggcggtgacgctggcggcctgcggcgcggcagacgacaaggcaaacggcaccgcgccggacaccacacccaacggcagcatcaccacgcagccggacaccaacggcacggacaccggcagcgccaaagatgacctgaacggcggccacagcgaaagcggccgggcggatgaggacggacagatggacggcaccgcggagacgcggcggtacgaccgggcactggcagcgtcgctcagtcagctgatcctaaaccggatcggcgaatgacaaaagcgcggcgggcatcgtgtgcccgccgcgcggtttttaacggcaggacttgcatttttcaaaaaatgggatattatataggtgaaaaacgtccccgcccccttttttcgtcctctgaacggcgaacgcggggcacggaacaaaatttacgccgcagtgggcggcagagaaaagaaggttttttctatgacaaagatcgacatcgtttccggattcttgggcgcaggtaagacgacccttatcaagaagctgctggccgaggccttccccggcgagaagctggtactgatcgaaaacgagttcggtgagatcagcattgacggtgggttcctgaaggactccggcgtgcagatcagtgaaatgtcctccgggtgcatctgctgctctctggtgggcgacttcaacaaggcgctgaaggacgtacatgagcagttccaccctgaccgcatcctcatcgagcccagcggcgtgggcaagctcagcgacgtgatcgtggcggtggagaacaccgtgaaggacgtaccggacatgaagctgaacagctttgtgaccgtagcggacgccacaaaggtcaagatatacatgaagaacttcggcgagttctacaacaaccagatcgagtccgccggtaccatcatcctctcccgcacccaacggctgagccaggagaagctggaggccgccgtggcgctgctgcgggagaagaaccccaatgccgccattctcaccacaccctgggaccagctggatggcatgaccattctcagcgccatcgagaaggtctctctggcggacgagctgctggcgcatatgcgcgccgagcacgaggcggatgaggcggagcacgagcatgagcatcaccatcaccaccatgacgaggatgagcacgatcatgaccattgctgccatcaccatgaccacgatgatgacgatgacgacgaccacgaccatgagcactgctgccatcatcaccacgatgaggacgagcatgaccacgatcatcaccaccatcaccacgacggcgaggaatgcgatgatccccactgcggctgccaccatcaccatcatcacgccgacgaggtattcaccagctggggcacggagacggtgaaggcctactccgaagcggagctggagcacatcctgacggcgctggacagcggcgaatacggcgcgatcctgcgggccaagggtatcgtggctgccgccgacggcggccagtggctgcactatgactttgtgcccgaggagcaccaggtgcggcgcggtccggcggactacaccggccgtatctgtgtgatcggctcccaactgaaagaggataagctctctcagctgttcggactgtaaggagcggctgacatggatattcctgtttatcttattgccggatttctggacgccggtaagaccgaattcatcaacggcatcctgcgggacggtttcgccgccgaggatcggacgctgctgctgtgctgcgaggaaggtgagaacggctatgatcccaaggtgctgggcaacgtattcacctataccgtggaggacgaggaccaactgacgcccgactttctgaaaaagctggaaaagcagtaccggcccaagcaggtcatcgtggagtacaacggcatgtggagcatggagaagctgtaccgcgaggggctgcccgccaactggatcctgtaccagatcatgtgcctggtggacgccacgaccttcgagatgtatttgaagaacatggggcagctgatgatggagaagatcaccaactgcgatatgctgatcttcaaccgctgcaatgagcagctgcgcgcccagcttcgcagccgcaacctgcggatggccaaccgtcgggcggatatctatctggaaaacgaggacggcaccagcgaggagtacgtcacgccggagatgtcgcccttcgacctgaccggcggcaagctggaggtgccggacgaggactacggcatctggtatgtggacatgatggacaacccgggacgctacgagggcgtggaggtgtccttcagggcgctgatgtgccactccaaaaagttcaagggcgtgcactgcccggggcgcttcgccatggtgtgctgcgacaaggatatgcagttcctggccttggtgtgccgcggcgaagggctggagcagtataaggacaagcagtgggtgaagatacacgccacagtgaagaaggaggcctgtgacgcctatcagggcgaaggccccgtgctgtacgtcacctccatcgccgccaccaccaagccggacccggagatggtgtccttctgatcgcgatctgtatattttcaccgcacaattgcagcgtgtatagaaaaagacccgccgatggcgggtcttttcaacttgtttcggcctcagcggaccagctggatggcggcggggaggttttcgatctccacgcggggcgcactggggcagtattcaccgtccagggaccaggggaggttctcctccgtggtcagggtgacgcgccggacatggcgcagtatcacgccgggatagtcgtactgcatacgggtcatggcggtaatgaggttctgcagatccagtgccgtctttggcatacggagcagcagcagttcgaattttccgtcgtccatccgtacacgggagggatccagcttcactaggccgcccaaggaggtggaattgcacacagcgccgaaaatgaactccccctcaaagcgctcaccatcggcttccaccgcgcagcggtagggccgcagggagtccagatcgcccagcccctccagaatgtaggcaaaatggcccagggcgttcttggccgcctgggtagcggagtaggaggaccgggtaaaggctccaaaggaggccacataggcgaaatagcggtcgttatgcctccccacgtccagggggcagggcgtgccggtggcggccgcctctgccgcggcgggcagcatggtgtgaagatgcaggctcatggcaaagtcgttggtgctgccgcagggcagatagcccagcaggggccgctgctccagctgcataagcccggatagcgtctcgttcagcgtgccgtcgcctccggcacagaccaccatgtcgtactgtccgccccaccgtgcggtgatatcgcgggcctggccgcccgcctcggtgatatagacccgtaccagatagccggcacgggagaactgcgccacggcatcgaacagcggggcgcgggattttgtctttcccgcacggggattgacgataaacaagagctttttcatagggacacccttccataccatcgtaattctcgcattttgcgcggggttgtccgagtatgataccacagttgcggcgggattgcaatacacattccgccgcgggtgtttgtgttcgaaaattgttgcaaaacgccgcgtatacgggtatgatagaaaaaacagcagtgggaggtcctgccatgaagcgaacgcagtatttcaaatgggggctgacggcctttttgaccgtatgtgccgtgctggtgttctacgacaccttctatcaggcgggaacgctgcagcagttcgtgtccaagctggcatccatcctggcgccggtgctgtatggcttcgccatcgcctatctgctgacgcccatcatgtcctggctggaacgagccattgcggcgctgtggaaaaagctcttcaaaaaagagctgaagcagccgtcgggcgcgctgcggctggtgagcatcctgttgaccgaggccgtggtcatcttccttctgtacctgctgatgagcgtgctggtgccccaggtgctggacagcgtgaccaccctcatcaacaacgcagagtcctactaccgcaaggtctatcgctgggccaacgacctgctggagagcgacagtgggatcggtgtctggctggcggggctcatcaccgagcgctataccgacggcatggcctttttgaccgacaaggtgctgccctgggcccagaaggccattgtgccgctgaccaacggaatttggagcggcatccgcggcgcggtgggctttgcctttgacctgatcgtgggcatcatcgtgtccatctatctgatgggcatgaaggagaagagcctggctcgctgctgcaaggcggtctacgccgcgctgccggaggaaaatgccgacgcggtcatgcgcggcacgcggcgggtgaacgccatcttctccggctttgtccgcggcaagctgctggactccctcatcatcggcatcctgtgctttatctgctgctccatcctgaaaatgccctacaccccgctggtcagcgtggtggtgggcgtgaccaacgtgatccccttcttcgggcccttcctgggcgcggtgccgtcggcattcctgatcctgctggtcagccccaagcaatgtctggtgttcgtgatcttcatcgtgatcctccagcaatttgacggcaacatcctggggcccaaaattctgggcgacgccacgggcatctccagcttctgggtcatcgtggccatcctggtgggcggcggcttcgccggcgtgctgggtatgttcatcggcgtgccggtgttcgcctgcatacaggaactgctgaaattcctgatggaccgccggctgcggaagcggaatatgcccacggaggcctacgcctatgtgggtcgggccaaggattccccgccggaggatacgcccgcgcccgaacccaaagatcccgcgtgatatggcaggcaggcgggcacgcagcccgcctgccttttctttgaaaggagcacctccatgacaaaagacctctacgataagctgatggtcttcggcaacgaccgggagccgtttctcacccacaactttatgcggaccaccgacctggacgacggtaccgccaccgtgacgctgcccatgcacaccgaaagtctgaaccgctggggcggcgcccacggcggcatcctgttctcgctgtgcgatgtggccatgggcatggccattatgacgctgcggcaggagatggtggtcacggtgaactccaccatcgattatctgtccgccgcggccgccggcagcaccctgaccaccgtgggcaaggtggaccgcctgggcggcaagctggccttctgttccgccgagatgaccgacgaaaccggcaaggtcatcgtccgcgcccactgcgtcatgtgcttcaccggcagggccctgcccctatgagccgccgcgccctgtgccgctggtgtattgcgctggcggtgttctttgccgcgtatttcgccctgcgcaccagccgcacggccatgactgccctgtggtacggcgccgtgctgccggcggagcagtggctggggcggctgtgtggaaggttgacgctctccgtaggtgaggtcctgatcttgacggcggtgttctgcgccatactgtggctggccaacgtaccccggcgcatcatcgccgcgcggggccgccgttggggcatggccctgcgcctgacgctgacagcggcgctggcggcagccacggtgtatgccggcttctgcctgacctggggcatcgggtacaacactgacggctttcaggagaaaagcggcatccatgcccggccttccacggcggagacgctggcggaggtaacggcctattttgccggcaatctggccgcctgcgccgatgacgtccccagagatgaaagcggtgtctgcacgctggaccggcaggcggtgctgaaccggagcgcctccgcgctggatgtgctctgcggcgagttcccgttcctgcgggcggaaacgggcggtgccaagggcttcggctgctcccgggcgctgagtgccctgcgcttcaccgggttctacttccccttcaccggcgagccgaacgtcaacatggacagtccggcggcctttctgccggccactgtatgccatgagctggcgcaccagcggggcatcacggcggaggaggagtgcaatttcatcggcatactggccgctgtccggtcagaggacgcagggtaccgctactccggctggctgacggggttcgggtatctgtccaacgccctgtacagcgctgaccgggaggcgtggcagaccatacgggacgcactgccggacacggtggtggccgacctgcgggcggacaacgcctactgggcgcagtttcgcggcgtcgtctcaaaggtctcggacaccgtgtatgacggctttctcaagagcaacggcgacacggacggcagcaagagctacggcgtggtcacggacctgctggtggcctatttcggataaaaaatattcccttaggccagttggcctaagggaatattttttattggtccgtttgatccggcgaagcctccgggcagtctattgggatcatcctatgctcatacgctccagcacgataatatgatacagctcttccgcattggacgcatcggcagattgcccccagtgcgtttgcagccctatccgaagcgtctccccgtccggcgtatgccagagcagcgccgatgcgtagacattgccgttttcatcggatcgcatttcgacctctacatccgttcccggctgcgccctcccgttgacaacgggaaatgtcgtctcatagcgcccgtcgccggtgcggagggtgaccttgccgttttccagacatacgctcccatatatcatgccgtcccggtagtcatcggcgacatacacagcgtctccctcactgatccatacgcttttgcagacgccctgcgtataggccgcccgatactgtctgacatcatggatatccgtgggccatcttactccgtccacggtccacttttctttccacgttgaaaatttcagattgttaaggccctccgccctgctgtcgcatacaagccagtggtaggtatgttcatcgccgtgcctttgagtataccgccatgacgtatcatcccaatcaacagagggatctccactctcatacttgctgtaccagatatgcaggtttctccccagcttaaagatatccaccgcatcattaatggcacccagcgtttccccgtcataatcgatgtcccggtagtaggtataaagctcgtccttgcgcaccatatcgctgtaggaagcgtcgtagggcagcagcacgtcgtagtaatacggttctatgacctcctcgcagagctgccgcatcatgggatccagcgccagcgcctccagacctgggatgtcctcctccagcagcgcctcgctgaccgcgtccagataggcgcactgctccgccgtcagcgcggcgcggggcgtgttgtccgtcacggcggcgccccagcacgacaggccgatggccaccgccgcggccccggccaccagcatggccggaagactgcggcgcttcttctgcggcggcgcggtgtcgtcgcgggatatctcgttccccggcgcggcccactcccgcggcggcgcggagaactccggcctcggcggagaaaattccgcgggtgccggtgaaaattccttgtcgttcatggcttactcccgatccagctccaccctgtggacggggcaggagagcccctcctcctcaaaggccatgaacagcgtgcggttcagcaggcgctgcgccttgtaaatgttctcctcgtgtgtctcacccgccacgcggatcacaacggcgcgattttcatagtccagcgtctgcacacccagataggccggggccttgctgaacaggtcggggtgctcccggttcagcttcggcagcacctcgcccagcaccttctccgcccgcgccagactctccttgtcataggggaccgccatgtcgcacacggcaaaggacaggtcgttggatcggttgatcagactgcggatatcggagttgttgatgatcttcacgtttccgccggagtccatgatctgcgtggtacggatgccgatttgtgtgaccgtgccgcggaagtcgcccaccacgatgatgtcgcccacctcgtactggtgctcaaacagcatgaacgtaccggtgatcacgtcggcaatcaagctctccgcaccgaagccgatgatcagcgccagcacgccggcgccggccagcagcgcccgcacatccacgcccacgatagacagcgcccacagcagccccacgatgatcagcagatatcggatagcgctgtccgccagcgtgaacacggtcttgccgtggttgctgctgggcgacactctctgaaatacggctctggccgccgccgaaaacagcaccaacccggaaaacagtatgatcagctgtgtgccgatgttccagatctgcgtaaacaggcccgcgggcacgggcaccgccgcccgcgctgccagggccgccgccagcagcacagcggccaaccacggcagcacctttcccggtttctttttcatctcgtttttttcgttttccatgatgtatttctcccgttttttatccatatgataagcagaaatttagcaaaacttctacatacacagaatacaccgccttgtcgaatgtgtcaatatatcgcgcgaaatatccgaatattttgccctttttgcgcgaaaaacacccgccctgcgttatgcagggcgggcgcttttctatcacggtttacaggcccaggccggggatgttcagtccgccggtgagtgagctcatggagttgttcatggcatcatctgcctgccgaagtgcctcatttaccgcagaaatgaccagatcctgcaacatttccgcgtcctccgggtcgatgacatcgggcttgatggtcagcttggtcagctcctttttgccggtgaccacggcggtgacggcgccgccgcccaccgaggcggcaaactccgttttttcaacttcttcctgcgcttttgccatatcctgctgcattttcagcagtttttgctgcatctgcgcctgctgctgcatcatcccggcaccgccggtaaagcccctgcgggcgctatatccctttgccatattcgtttctcctttatatcgatctgttcattttgccagtgtaaactatcggacatcttatgtgcagcatcggtctacccatgtgtaataccgatgcgctctttgtgtaacattggtgtgctccatgtgagacaccggtgcgctcagcatgaactgtcggcttatttgatgcgaaaattgtccagctgtttggcgttttccaccaactcgtccagcttgtccctgtggggagccggcacctcccagggcggcagatccggcggagcgggcggcgcctcctccggcaggggcgggcgctcatagtcgtccgccggcggggtgggttcgggccggggcgcggggcggaccggggcgtgccgcacgggcacggcggagccgccgcctacggtgaactgcacccggacgggacggcccacatggcggctggtgacgccgcagagcacgtcctcgatggccttgcggctgagctgctgcttcaccagatcgttggcacaggaaacggtgagcacatccccctccagcgtacctgtcgcctggttcagccatacccggtcggggatggtcagcgggcctttatagtgctcgataagcgcggcccagacctggctgtcaccgccggcagcgggcgccgccggggcgctctccggcgcaggcgccgcgggtgcgggggccatggggaccggtgcgggttccggtgcgggagatgtctcctgcgggatcggaggcacttcacgccggggcggcggagtcggcgcagccgccggacgggcggcgggtctttccgccgggacgacgcccttcttcaaggcgtcctccagggcggagacgcggtccgccagagtctccgtgtcgttggaaaggctctcgtcgcacagacgcagcaggcacagctcggcgtccgtccgctggcggatgctccggggcagggccgcggcggtgcgctggatggtatcggtcatatagagcaggcggcgcatggggacctccgccgtcagttcagagagggtcttgcgatcatacaggccgcccagcagggcggcgccgccctccggcgcggcggccagaacggtcatgtcccggcagagatcgctgagctcgcccagcagcgcgcccacatccttgccgccccggtacagctggtccagcagcgccaaagcgtcgcccccctgacgcgccaggagcaggcgcatgagctgcaccgtctgggtgctgccggccagtcccagcgtgtccagcacgctgcggccgtccacgaccgcgccggcggcacggcactggtccagcaggctgagcgcgtcgcgcagcgcaccgttggccatgcgggccagcaggtccgccccgtccggggtcaggtcgatggcttcggccttcgccaccttcagcagctgctgctccatatcgtggggcaggatgcgcttgaagttgaaccgctggcagcgggagagtatggtggccgggaccttctggatctcggtggtggccagaataaacagcaggtgggcgggcggctcctccatgatcttcagcagggcgttgaaggcgtcgcgggagagcatatgcacctcatcgatgatgtagacgcgcttttgcagcaccgccggcgggtagacggcctcctcccgcaggctgcgggcgtcgttgacgctgccgttggaggcggcgtccagctccgtcacatccagcagtgaaccgtcatcaatgccgcggcaggcggcgcactggttgcagggcgcgccgtcaatggggtgctggcagttgacggccttggccagaatacgggcgcaggtggtcttgccggtgccgcgggtaccggtgaacaggtaggcgtggcccacctgaccgtcggccacctggcgctggagcgtatcggtgatgtgctgctggcccaccacctcggaaaaggtcttgggccggtatttgcggtacagcgcctggtacatgggcacacctccctgctgacaaacaaaataaacgagtcctccgccgtgagccacagggccggcaccctcgcggcacatggatgatccctcttaatgctgctcggttccccgcctgacatgattcgtgggtatccattgcgcgagaccggccccgcagctcacggcggaggacaagttcgtgagatacattctactacaattcttccgcgatggcaactgttttttgcgtttgcttcgcgtttgctttcatcatgccctcatagccattggatataaacgaggccgaagggcaggcggcgcggcgcagacgcagttcagccgcgccggaaacgacagacacgaaaaaaggcggcgctgaagcgccgcctttttttcagtaaaaggagagagaaatacaatgggtgggtatcctttcggatgagcgtatcatacacgcacccgggcgggaagtcaacaggtttggcaaagaattaacaaaccattcacaaagtagggactccgttcacaaatcgtttacaggcaggacacccctcccctattgacaacaaaaaatattggtgctaccatttagcacgctaataattcgtatgctaataatttaaaggtgaagaaggagggtcgctatgaaatgttgctttgacgagcacccggcgcacttcggcgcgctgttcggctactgcgatcaccaggtgcataagctgatggggcggatgctgaagcgctacgacgtatcgcccatgcagtgccggacgctgatgttcctgcacgacgcggagggcagcgtgaaccagaaaacactggagcgccacctgatgatcaagcccagcacggtgaacggcatcgtggaccggctggaggagaaggggctggtataccgcaccgtcagcgccacggacggacggtgccgcattctggcactgacagaggagggccagcggttccatgacgatttccagaccgtgctgcaccaggtgaacgaacggctggagcgcggcttcacgcaggaggaaaaggcgcagttcaccgcgttcctgctgcgggcgggacggaacctgaccgacgaggaggaggaagcatgataaaaaaattggcgccctataccaagggctaccgcctgctgatgctgttcgccatcgcctgctccgccggagaggcggtgctggagctgacgctgcctcaggtgatgagcgacatcgtggatatcggcatcgccaacggagacagaggctatatcctgatggcggggctgaaaatggtcattatggcgctgctggcgctgggctgcggcgtgggcgcggcggctttggccgccaaggcgtccatgggcttcggcgcggcgctgcggaaggcggagtacgagcaggtacagcgcttctcctttgccaacatcgagcgcttctccaccgccagtctggtgacgcggctgaccaacgacgtggcctcggtgcagatgaccacatttatgggaatgcgtatgctggtccgcgcccccaccatgctggtgacggcgctggtaatggccctgatcatcagccagcggctgagccaggtgttcctggtggtcattcccctgctggtcatcgcggtggtcatcgtcatcaagcgggtaggtccgttcttcacctctttgcagggggccacggaccagctgaacctggtggtgcaggaggacctgaacgccatccgcgtggtgaaatcctttgtgcgtgaggcgcaggaaaaggagaagttcacccagcgcagcgagaagctgcgaagcatggccgagcgcgccttcggctttgtggtgctgttcatgccggtgatgatgatcctgatgggcggcaccatcacggcggtcatgtggatcggcggccactacgtgtgggagggcacgctgctctccggcgatctgatcgcgttctttacctatgtgagtgagatactgatgtcgctgatgatggtatccgtggtgctgatgatgctgacccgggccatcgcctgcggcaagcgcatcgccgaggtgctggaggagaaaccccgcatcaccgacgagcaggccgacccggcgctgaaggtggaggacggctccatccgcttcgaccatgtgtatttcaagtaccacgacacggcggaggcctggaacctggaggatgtgagctttaccgtacccagcggggccacggtgggcattttaggcggcaccggcagcgccaagaccacgctggtgagcatgatcccccggctgtacgacgtgaacggcggcgcggtgtatgtgggcggccacaatgtgaagaactacaccatggaggcgctgcgcgacggctgcgccatggtgctgcagaagaacacgctgttctccggcaccatccgggagaacctgcgctggggcgacgagaacgccagcgatcaggagatcgaggcggcctgccgtctggcctgcgccgacgagtttattgagaaaatgccggacggatacgacacctatatcgaacagggcggcaccaacgtctccggcgggcagaagcagcggctgtgcatcgcccgagcggtgctgcggaagccgaagatactgatcctggacgactccaccagcgcggtggacaccgccacggacgcgaagatccgaggcgcgctgaaaacggcgctgcccggcaccacaaagctcatcatcgcccagcggatcacatccgttatggacgccgacctgatactggtgatggacgatgggcacatctccgccataggcacccatgaggagctgatggcgcagagcgacatttatcgggaggtctatcgctcccaacaggaaggggtgagcatcgatggctgaacaaaaacgcggcggccctcgcggccacgggccccaggggcacggcttccagcggcccaaggacttcagaggcacggtgagcaagctgctgcgctatatcgggcgctataaggcgtcgctggcggtggtgttcatctgcctggtgatcagctccgtgggctcggtgatgagcagctatctgctcaagcctattatcaacgactatatcctggtgggcgacttcgccggcctgctgaaaatgctggcgctgctgctgggactgttcctgctgtcgggcctgtgctcctatgcctacgcccgcatcatggtgcatatctcccagcggacggtggctcagatgcggcaggatctgttcgacaaattgcaggacctgcccctgcggtacttcgacacccaccagtccggcgacctgatgagccgctttaccaacgacatggacaccgtgtcggagatgatcaactccagcttcgccagtgtggtgtcctgcgccttgacgtttatcggcattgttgttatgatgctgtatatgaactgggtgctgacgctgatcacctttgcctttctggtgctgatgctgctggtggtcaagggcgttggcggcagaagccgcgtgagctttcaggcacagcagcaggcgctgggcgccatgaacggctatatcgaggagatggtggagggccagaaggtcatcaaggtgttcaaccacgagagcaaggccatcgcgcagttctccgggctgaacgacagctatcgggacgccgccacggcggcccagacctactccggcgccatgatgccggccatggccaacctgtcccgcatcgactacgccgtcacctgctgcgtgggcgggctgctggccatcggcggaatgttcgacgtgggctccctgggtgcgtacctgctgtatgtgaagcaggtgagccagcccatctcgcagatcagccagcaggtgaatgtgctgctggcggcggtggccggcgcggagcgcatcttcgccgtgatggaggccgagccggagacggacgagggcaagaccgtcatcgtccgggtggaaaagcacggcgatacgctgaccgagacagaccgccgcaccggctgctgggcatggaaaaagcccgacggcacgctggtggagctgaagggcgacgtgcgcttcgaccatgtgaccttctcctatgacggggagaaaacggtgctgaacgacgtgtcgctgttcgccaagccggggcagaagatcgcctttgtgggctccaccggcgcgggcaagaccaccatcaccaacctcatcaaccggttttacgacgtacaggagggcaccatcacctatgacggcattgacgtgagggacatccagaaggactctctgcgccgttcgctgggcatggtattgcaggacacccatctgttcaccggcaccatcgccgacaacatccgctacggacggctggacgccacggacgaggaggtacgggccgcggcgaagctggccaacgccgacagctttatccgccatctgccccaggggtatgacacggtcatcaccggggacggcggcagcctgagccagggcgagcggcagctgctggccatcgcccgggcggcagtgtccgacccgccggtactgatcctggacgaggccaccagctccatcgacacgcggacggaaaacctgatcgaacagggcatggactcgctgatggagggccggacggtgttcgttatcgcacaccggctgtccaccgtgcggaacagtcaggccattctggtgctggagcatgggcgcatcatcgaacgcggcgaccatcaggagctgctggcgcagaagggcaagtattatcagctctacaccggcaaggcggagttgagctgaggtataaacgaggaagaaaccggaaaagatcaaaggaggatgcaccatgacggaaaaacagctttgtgatatggcggtggccatgctggagcgttcctatgtgccctattcccacttcccggtgggcgcggcgctgctgtgcaaggacggcacagtattcaccggctgcaacgtggagaacgccgcctacggcgccacgatatgcgccgaacggacggccatggtcaaggcggtcagtgagggacacagggacttcgacaccattgtgatcgccgggcgcagcgaggactactgcgtgccctgcggcacctgccggcaggtgatgatggagttcgcacccggcctgacggtgatctgcctgaacggaaagggcgagagcaagcgcttcgcgctgaaggagctgctgccctacggctttgaccagagctggctataaacgcggcagaattttcatggaaccaaatcgcaccgcgctccgtctcaatggacagaaacctatttcaggaggaaactacacgatgaaaaaaatcatttcccttgtgctcgccgccgtgctgaccctgagtctcgccgcctgcggcacgaagaacgacagcaagggcgaccagcccgccgcgcctgccagcgctcttgacctgctggaaaaggtgtggagcacctacaccgaggacgagaagttccccgccagcggcggcgactactccgaggcgaacagcaaggaggacgcccccggcgtctatgacctgaccgaccgtgccgctgtggacagtgccctcggcctgccggagacggccaaggtggatcaggccgcgtcgctggtccatatgatgaaccagaacacctttaccgccgcggcgtaccactgcaccgatgatgccgatgcgctggccaccgccctgcgggacaacatccagcagcggcagtggatgtgcggcttccccgataaggttgccgtggccgtggtgggcgagtatgtggtgtccgtgttcggtgccgaggatcttgtggacacctttatgtcccacctgaacggcatcttcggcgtgcagcccgtctacgacgaggccatcctgtgaagcgctggatagagcgaggcgtatttctgctggcggcagcggctatggtcatagctgctgccgccattcccacccggcgggcgcaggaggatacgctgccggaggtatatgtgtaccgtggctatgccgccgccaccgacgcaccgtggagcgagaaatcactggacttcgccgtaaaacggttttctcacctgttggaggcatatttccccgggtcggaacacgtatatatgagcgtgatcccagataaggccgcttttatggagacgccggagggctacacgcccgccggggcccaggagacggcggactatctggcgcagcggctgccggtacagacgatcgatatttccgggctgctgtcgctggaggactattaccgtaccgatccccactggcggcaggagcgtctttccgccgtggcgcagaccatatcggaggccatgggtgcacttgtgccgaacacgacggaggagacgctgtgcgcgctggcgggcgaattccacggcagctactggggcaagacggcggagccgctgacggcggacgtcctgtcctatatcacctctcccctgctggagggctgcacggtgtacgactatgagacggacagcaccggcggcgtgtatgatctgacggcagcggagaaggcgccctacgacctgtttctgggcgggccgaaggcgctgctgcggatcgaaaacccggcggcagacaacgaccggacgctggtggtgatgcgtgactccttcggcagcagcctgattcccctgctggcaggcggctacagcaccgtatacgcggtggacatccgctatatttccaccgacgcgctggcgcgggtgacggaattcccggagggggcagacgtactgctgctgtacagcgttgccgtactgcaaaacagcattacgcttaagtaagcaaaaggccgggtgctttcagcgcccggcctttttatggcagaaagaacgccggagcattgctccggcgttctgcatttacttagaagaagaaatccttgatctggccgtacaggatgaggaccatgcacagcggggtgatgaacttgacgcagaccttgaagaagccgtagctgcccatggcatgaccggactgctccgcctcttccttgacgaactcggggccgacctcccagccgatcatcaggcacatcagcagggcgcccagcggcatcataacgccctcggacagtgcatcccagaagtccagccagtcagccgcccagttcttgggttccgctatattcagtatattggccggtgcgataccgctggaacccaggcagtcggcgcagaccaggatgcagcccaggcccaccagagccgcggcgatcagggtgtacttcttgcgcttgtcgcccttgccctcgatacgggccttatccacaaagtgggccacgatgacctccagcagggagatggaggaggagatggcggcaaacaccaccagcagatagaacaggatgccgaagatggggcccagtgtgcccatggagtggaacacgttctgcatggtgataaacagcagcttggggccgccgatgttgccggcgggatccagcgcgaagcgggcgggcatgacgcacagaccggccatcagggccaccatggtatccatgatgatgatcagcagggcgttcttctgcaggttctccttcttctgcaggtaggagccgtaggtgatcatggcgcccatgcccagagacagggagaagaacatctggccgccagcggtggaaacaacgttaaagatgctgggagcgccggactggtaggagacgatggcctgtgccacgccattgaccatgatggaggaaacctccacgccgtcaacaaccgccttggcgggcacataatagccgacattggccgcccagccgggggagaacatgtacttcagaccgtccagagcactgccgttaacaacgccctccacaagagaaccgtccgcctgcaggatctgcacggccacgtcggtaccctccagggtgcaggcgcggatgatgcagatcagcagggccacgaacagggcgggcatacccacggagcagaccttctcgatgccgccgccgacgccgcccataacgatgagcatggtcagcgccacgaaaataaggccgtagataacaccctcaacgggactgcccaggaagttgccgaaaatttcgccgccggacaggccattggagccgaagccggcaccgaacagatcgccgatgttcagaacggtgtacttgatgcagtagccgcccagtgcgcagtagaagaacaggatgaagaaggcggacaggatgcccagccagcccatccacttgaacttcttggacagagccttgtacgcgcccacggcgccgtggccggtcttgcggccgatggccagctcgcccaccatgacgatgaagccgcacaggaccgccaggatcagatagatgatgaggaacgtgaagccgccggaggcgcccatcttattggggaagccccagatgttgcccaggccgactgccgagccgaccgcggccatcaggaacccgaaattggttccaaagccttttctttcttccattgttttctctccttaacagatttttgctcctacatcgacgcaggagttggtaaattttaccgcgcccgtctattgacaggaaacggcacggggcaccgccatgccccgcaggtatttcctcacgggataaaatcccttcaaggctacctgaaaaaagtatacaggaaactctttccgcccgcaattagcagtttttataaaaattgagcgccatattgtacatttttaacattctatgaacggatttttccacatattttatatggtttttgcttctttttttacattgaaccattcagtttttggcggggttccgggatttttgcaacagacggcgaatgattttcttttcaagaaacttgatcggtaaaattttaacgcggcgacgagaagaacggcaggggcgcgggggttttctttcggggagaagtgtggtatactgttcctgattctttgcagggaggtgggggatgatgagacggttccgggcgctggtgctggcggcggtattggcgctgacgctggcgggctgcgggcggcaggatcgtccgcaaagcgggaaactgaacgtggtgtgcacgctgttcccctactacgactttgtgcggcagatcggcggggacgcggtggacgtacagctgctggtgcccgccgggcgggagacacacagctttgagcccacgccgctggacgtgatcgccgtcagcgaggcggaggtgttcctctacaacggcggggaaagcgagctgtgggtggaggacattctggacgcggcaggcgaggctatcccctaccggctggctatgatggactgcgtggagacataccgggaggagtacgccgaggggatgcagggcggccatgaccacgcacatgacgaacatggcgagcacgatgaccatgaggcgcatgacgggcatctgcacgatggccacgaagaggaaatagagtacgacgagcacatctggacatcgccggtgaacgccatggccctgtgccgggccatctgcgatacgctgtgtgaggccgatccggacaatgccgacggctatcgggctcggctggcggactatctggacgaattgcaggcgctggacgagacattccgggacatcacgggccatgcggcacggcggctgctggtgttcggcgatcggttcccgctgctgtatttctgtagggaatatgatttggattaccgggcggcgttccacggctgcgcgggagacacggagccgtccctcgccacgctgaaatatctgatcgacgtggtggaggagcaggagataccggtggtatacaccatcgagctgagcagccggaaggtggcgcaggccatcgccgagaccaccggggcgcaggtgcggacattccactcctgccagacggtgagccgggcggaattcgacggcggagccacctatatcagtctgatgaccgccaacgcggcggcactgaaggagggactgtcctgatggaacaggagaaacgcatattgttggactgccgggatgcagcgctgggctatgagggcaagccggtgtgggagcacctgagctttcaggtacacagcggcgactatgtgtgcatcgtgggcgagaacggcagcggcaagtccacgctggtgaagagcctgctggggctgctgcaccccatggcgggcgagatcgtacgttcgccctccctgcgctccggcgccatcggctatctgccccagcagacaaaggcgcagaaggactttcccgccacggtgacggaggtagtgcgcagcggctttctcagcgggaagggaatgcggtttttctacacgccgaaggagaagtccaccgcgctgatgcacatgggcaagctgggcgtgctggagctgaaggaccggtgctaccgggagctgtccggcgggcagcagcagcgggtgctgctggcgcgggccctgtgcgccgccggtgagctgctgatcctggacgagccggtgacggggctggacccggcggcagcccaggagctgtaccgcacgctggaatacctgaacaagcaggagcgcatcgccatcgtggcggtgacacacgatatacgcagcgccctgcgctacgccgaccacattctgcacgccggccacggaacgtactttttcggcacggcggcggactatctaacgtccccctggggcaaacggttcggaggtgacgaggcatgagcttactgctggaaatgttcacatacccgttcatcctgcgggcttttgtggtgggtatcctggtggcgctgtgcgcggcgctgctgggcgtaccgctggtgctgaagcggtactccatgatcggcgacgggctgagccatgtgtccttcggcgcactgagcatcgcactggcctgcggctgggcgccgctgccggtgtctatcccggtggtggtgctggcggcactggggctgctgcggatgacggagagaagccggatgggcgcggacgcggccatcgcggtggtcagcgcgtcggcgctggccgtgggcgtggtggtgacaagtctgaccaccggcatgaccacggatgtggacagctttatgttcggctccatcctggccatggaccgggcggatgtggcactgagcgtggggctgtgcgcggcggtactggtgctgtatgtgctgttttaccatcggctgttcgccatcaccttcgacgagagcttcgcccgggccaccggggtgaaggtggggctgtacaacaccatcctgtcggtgctgacggccctgaccatcgtgctgggtatgcggatgatgggcgcgatgctgatctccagtctggtcatcttcccggcgctgacggccatgacgctgctgcggagcttccggggcgtggtcatctgcgccgcagggctgagcgtggtgtgcttctgcgtggggctgaccgggtcgtacctgtggggcacgccggtgggcgccacggtggtgctggtaaatttggcggcgtttttgctgtcgagaggcgttatgaagctgaaaagagcgtcctaagggcgttcttttcagcttttcgacctattttgcgggtgctttttgcggaaaaacccttgcgtttcgtgtgcttatatggtatgctatgtgtgtacgtaaggttaaggtattgactggagtggacgagatcgtccgctttttttaatggtcatcgttctatgatgaccgggacgttctgttggagggcttgctgtgaaaaagatcaccgaggtcgtatgggcgctggcggagccggcggtgcaggcgcagggctgccgcatctgggatgtagagtacgtccgggaggcgggacagtggtacctgcggctgtatctggacaaggacggcggcgtggacattctggactgcgaggccatcagccgcacggtcagcgatctgctggacgaggcggaccccatcgagagcagctacgtgttcgaggtgggctcggcggggctggagcgccagctgaagcggccgggggattttgcgcagttcatgggcagccccgtgctggtgaaaacgtaccagcccaaggacgggcgcaaggagttcgccgggaccctggctggctatgaagacggcgcggtgctgctggacatgggcggcgagacggtacgctttgagaagaacgagacggcgctggtgcgcctgcgggtagaattctgagacaacacgacttgagatagaaggagaaacgaccatgaaatgtgacgagatcttcgcggcactggctatgctggaaaaggaacggggcattccccagagctttatgatgggcaagatcatccaggcgctgaccaccgcctataagcgcgaccacgagggcgtggagtatgtggtggtggacgtggatgaggagaagaaggacctgaaaatgtacgtccagaaggagatcgtggaggaggtggagaaccccgccagccagatctcgctggaggaggccaagcgcatctccgccaagaacgagctgggcggcatggtgaacttcccggtggagtccgtggaattcggccgcatcgccgccggcaacggcaagcaggtcatcatccagggcctgcgggaagccgagcacggcatgatctatgacgagtggggcagcaagcagcacgagatcctcaccggcaccgtcagccgcatcgacccccggaacggcaatgtgatcctgcggatcggcagcggcagcgaggccacggaggctgtgctgaccatgaacgagcaggtgcccggcgaggagctgcacgaggggcagatggtgaaggtgtatctggtggaggtgcgccgcagcacgcgcgggccgcaggtgatgatctcccgcacccaccccggtctggtgaagcggctgtttgagctggaggtgccggagatctacgacggcaccgtggaggtgcggtccatcgcccgggaggccggcaaccgcacgaagatcgccgtgtggtccgaggaccccaacgtggacgccatcggcgcgtgcgtgggccccaggggccagcgcgtgaacgccatcgtggacgaactgcggggcgagaagatcgacatcgtgaagtacagcgaggacccggcggagtttatcgccgcggcgctggcgccggcggatgtggtcagcgtgcagctggccgacgagggcaaggcctgccgcgtgacggtgcccgcagaccagctgagtctggccatcggcaaggaggggcagaacgcccgtctggccgcgcggctgaccggctataagatcgacatcaaggcggccaacgcggagtaagcggcggctgcggaaaggaacggcagcgatgcagaagacccgaaagataccccagcggcaatgtgtgggctgccgggaaatgaaggacaaaaaggcgctgctgcgtatcgtgaagaccccggagggggagatactgctggacagcaccggaaagagatccggccggggcgcgtacgtgtgcccggacccggagtgcctgaaaaaagcacggaaaagccgtgcgctggagcgcgccttcgacaccgccataccggcggaggtgtacgacgcgctggaagggcagatggtggcactgtgacagagcatttgttatccactttgggtctggcgctgcgcgccggtgcggtggccgtgggcgaggaacccgtaggcgcggcggcacgggccaagaaggccagggtcatctttacggcgcgggacgcggcggcatcctcggtgcggcgggcgtacagcttcggccgggcaggcagctgtctgtgcctgcccttcccggcggacaaggaggatttcggccgggcgctgggccggaccagcgtggccatgtgcgcggtgacggacatcgggttcgcccagtcgctggtgaagaagctggcggcggcggagccggagatctacggcgcggcggcggaggcgctggacctgaaggccaagcgggcaagggaacggaaggaagagcaattacagcacgagaagaacctgcgccagggcaggcaccgcgttcacggcggcaagccgccggagccgccccacgcgtctccggagcctccggcaccggagcacaggccccccgcgccggaacaccggcgtccgccgcggcgggagtatccggagggacgccccgaccgggtctataaggaacggaacggccgcccgcccagggataaacggccggcaaagaaggaggcccccggcgcacggtatgaaaacgcgcgtccggtaaagaaaggcaagggaagccggaagacgaccggcagataacaggaacacagcgcgccgtgagcgcggtgcgagcaactgagatggaggtggctttatttgggtagtatcgctaacaaatacagagtgcatgaggtggccaaggacttcggtgtgtccacgaaggagatcacggagatcctgaccaagtacgccgaaacgcccaaaaatcatatgcaggtgctggaggaccgggagctgagcctgatctttgagtatctgacccagcacaacccggtgagcagcatcgcggtgatcttcgccgagggcgccaagccggaggagaagaaggcggagaagcccgccgccaagccggcgcagaacgcatccgcgccggtacagggtcagggccagggcggcaagccccagcagggcggcaagccccagcagggcggcgcgcccaaggcggagcagcccaaacagcccatgtcccgcgtgccccagcggcaggtggtggacacccgcaaggccaccaacgtcaatctggacaagtacgacgagaaattgcaggatatggccgacgcccgcagcagcggtaagcgggaccagcaggccccacagggcaaggagaagttccgcagcaataagcagcggcgggacaataacttcgccagcaacaagcgcaagcaggaggaggccgaccggctgcggaagctgcggctggaggtcatcaagaagacccctgtgaccgtgcagatccccgacgagatcagcgtgggcgagctggccagccggatgaagaagaccggcgcagaggtggtcaagtgcctgatgaagaacggcgtgatggcctccctgagccagatgatcgacttcgacaccgccgccatcatcgccgaggagatgggctgcaaggtagagaaggaggtcgtcgtcaccatcgaggagcgcctgatcgacgaccatcaggacaaggacgaggatctggtgccccgggcacccgtggtggtggtcatgggccacgtggaccacggcaaaaccagcctgctggactatatccgcaacgcccacgtggccagcggcgaggccggcggcatcacccagcacatcggcgcctatcaggtgcagatcaacggcaagcccatcacatttttggatacccccggccatgaggcctttacctccatgcgcgcccgcggcgccatggtgacggatatcgccattctggtggtggccgccgaggacggcatcatgccccagacggtggagtccatcaaccacgccaaggccgccggtatccccattatcgtggccatcaacaagatggataagcccgaggccaaccccgagcgcatcaagcagcagctgaccgagtacggcctagtgtgcgaggagtggggcggcgacaccatcgtgtgccccatctccgccaagaccggcatgggcgtggacaatctgctggagatgctgacgctgaccgccgaggtgggcgagctgaaggccaaccccaaccgcgcggcgcagggcaccgtgatcgaggcccgtctggacaagggccgcggccccgtggccaccctgttggtacagaacggtacgctgcatcagggcgacatcatcatcgccggtacctctgtgggccgcgtgcgtgccatggtcagtgacaagggccagcgcatcaccgaggccggccccagcgtgcccgtggagatcacgggtctgagcgaggcaccctccgccggcgctaccttcaacgccgtggccgacgaaaagctggcccgcgagctggtggagcagcgcaaggccgaggagaaggccaaggccaacgcccctgtgaccaaggtgtcgctggaggatctgttcagccagatccaggccggcgagatgaagaacctgaacctgatcgtcaaggcggacgtgcagggcagcgtggaggcggtgaagtcctcgctggagaagctgagcaacgaggaggtccgtgtgcgcgtgatccacggcggcgtgggcgccatcaacgagagcgacgtcatgctggcgtccacctctcaggccatcatcgtgggcttcaacgtccggccggacgccgccgcccgcgacagtgccgcccgggccaacgtggatatgcggatgtaccgcgtgatctacgatgccatcaacgagatcgaggccgccatgaagggcatgctggcccccaagttccgcgaggtgctgctgggccacgccgaggtgcgccagacgtacaaggtgtccggcgtgggcaccgttgccggctgctacgtgcaggacggcaagctgcagcgcaaggactgccaggtacggctggtccgcgacggcatcgtgatccacgagggcgtgctggcctccctgcagcggttcaaggactccgtgaaggaggtgcaggccggctacgagtgcggcctgagcatcgagaaattcaacgacatcaaggaaggcgacatcgtggaggccttcaccatggagcagatcgaggtataacaaacagccgatgggtgggcgagcgcccacccatctttttcttgaaaggaggagcgccctatggccggaaaccgcatcggacgcatcaatgaggagatacgcaaggagctgagcgccctgctccgcaccgtaaaggacccgcgggtatccgaggggatgctgaccatcacgcgggtggacaccaccagcgacctgcggtacgcgcgggtgtatatcagcgcgctgaactgcgcggatgaaaagggcctgatgaaggggctgaagtctgcggccggatatctgcggcacgagctgggccaggccatcgacctgcgctacacgccggagctgcagttcttcatggacgactccatcgcccacggcgcgcacattctggatctgctgaaccacgtgaagcccgccaaccccgccaacgcggacatcgtgctgccggaggaccgggaatgagcgcgcggctgacggtgcaggagacagcggactttctgcggacgctggacggcgtgctgatcctgacccacgtgcgcccggatggggacacggtgggctgcgccgccgcgctgtgccgcgccctgcgggcgctgggccggacggcgtatctgctggaaaacccggagatcacggagacgtacacgccctacgccgaggggctgtgggcaccgaagggctatgtgccgcagagcgtggtgtcggtggacatcgcggcgctgaatttgctgccggagaacgcggtgccgtataaaaacgacatctgcctggccatcgaccaccacggatcccaggagttcttcgcggaacggacgtgcctggacgcggaggccgccgcctgcggcgagatcgtgtatgagatcgtgggcaggctgacggacatcacgccggagatggccatggcgctgtatgtggcggtgtccacagactgcgggtgcttcgtctatgccaacaccacggcgcggacgcaccgcatcgccgccgcgctgatggatcggggcatcgacgtggggccggtgaacaaggcgctgttccgcacgaagtcgccggtgcggctggccatggaggcccggatggtggcggacatggagctgtatgacaacggccgggtggtggtgatgtccatccctctggcgctgtgccgggagctgggcgctgccgagtccgacgtggaggagctgagcagtctggcggcgctggtgcagggcaccgactgcggcatcacgctgcgggagctgaagccgggacgggtgaagctgtcgctgcggacgggaccgcgggtggacgccagcaccgtatgccgcgtgctgggcggcggcggccacaggggcgccgccggggccacggtggacggcaccctggacgaagcgaaggcggccattctggcggcctatacggaggtcatgggataacatggccgacgggatcatcattatcgacaagcccgcgggatggaccagcatggacgtgtgcggcaagctgcggggcatactgaaaacgaaaaaggtgggccacgccggaacgctggaccccatggccaccggcgtgctgccagtgttcgtgggaaacgccacgcgggcggtgtcctacgccgagggcggggacaaggagtacgtcgcggggctgcggctggggctgacgaccaacacccaggataccaccggcgaggtggtggcggagcgccctgtgtccgtgacgcgggcgcagctggaggacgtgctggcgcggttcaccggggagatcgaccaggtgccgcccatgtactcggctatcaagatcaacgggcagaagctgtatcagctggcccggaaggggcaggagatcgaacggcccccacggcgggtgaccatacacgagctggcgctgctggagccggaggacggcgactggcggctgcggatacggtgcagcaagggcacgtatgtgcgggcgctgtgccacgacatcgggcaggcgctgggctgcggcggatgcatgagcgctctgcggcggaccatggccgccgggtttacactggcggagagccgcagtattgaggacgtacaggcgcagggcgaggccctgctctcccctaccgactcgctgttccggcagtacccggcctatcacatcgccggtgaacgggaccacagacggtgcctgtgcggcaatccgctggcggcggagggcttgcagccggggctgtaccgggtgtacagcccggatggggcgtttctgtgcctgagccgctgggaagcgggtgttctgacatcagagaaaaactttttcggagcgtgaacaacttggaaaagacagttatcgccctgggcttcttcgacggcgtgcaccggggccacggcgcactgctgcggaagacggcggagcgcgcccgggagctgggagccgtccccgcggcattcacctttgaccggccgccgaaggaggtggtcacggggcagcccgtgtacctgatcaactccaaccgggaccggcaggggctgatggagcgtctgtacggcatcgagcgggtcattttcgcgccctttgaccgggagatgatgaccatgccgtgggaggcctatctggaaatgctgatcgggacatacggcgcggtgcacttcgtggccgggcacgaccaccggttcggccataaaaacgccgggaacgtgcagcttttgcggcagaagtgcgcggagatggacatcgggtgcgacatcatcccgccggtacagcgggagggcatcacggtcagctccacgtacatccggacgctggtggaggcgggcgacatggagcgcgcggcggactttctgggccaccggcactgcctgagccagacggtgcagcacggacagcggatcgggcggaccatcggcatccccacggtaaacctggcggtgccggagcacgtgctggccccggcgcacggggtgtacgtgacggaggtatttctgccggacggacggcggtgcgccggcgtgaccaacgtgggcacgcggcccacggtgtccgacagcgatcaggtgtccgtggagacgtacctgctgggcttcgagggcgacctgtacgggcaggagctccgggtggagttctgccgccggctgcggggcgagcagaggttcgacacgctggaggcgctgcgtcaggagatacagcggaatattcagcaggcagaagcctattttgaggcatgagaaaaggcacccctgacggggggcctcttctgttatttcacacggcgccggggtaagacaccgcggaaaacggtgtcagtcctcgcgctttttgcccacaaacgccacgccggcggcggaggtcagcgccatgccgacatacagagcaatgcctgcgtcgaaggtcttggggctgcccttggtgtcggtggtcttggtgtcggtggtgggctggtagtagtaatagccgccggaggaagtggatgtccacttggcggtgagagtaatgttattcacagctttgtattcagcatccacctttgtggtaccatcataccagcctgcgaaggtatacccgctgcgggtgggggcaggcagggtaatggtgctgtcttttgccaccttaagcgcttttgccggggtagcctggttatcgttataattcagagtgacagtaaccatctgctcctcgctgacacctccgctatagtctgtacccttgaccggtgtcacttcgatggactggccgtttccgttttctttggagagatacagatgctcaatggtaccgtcggtgtatttaaactttgcaccgtaacccttatcatgctccacataaagattggtaaccgtaccgccattcatcgtaaagctaccggggttgctggcagaatacgcattggaattcacaaacacattgccgatggtaccgccgttgatcgcagtcagtgcaccggtggcattggcaccgatccacagatcggaactgtactgtaaataattgtcgtcctgatacttttcaacgtttttgttgccgacgatactgccggagttcatctcaaacgacgcgctgctggtcatataaacaccgccgataaaattgggagccttgccgttcgtgatggtcgcaccatcaatggtcagcttgcccttgtcgcagaaaatcacacggcacttttcgttgccgttcacggtaacatcttttaatgtgaccgtggcggaaacatacaaaacacaggcggtcttattatcgctgccggaagtaaagttgtcagccgccttgatggtatacttgccctggccgtcaatagtaacgtcctttgcaagattgagtgtagaagtcagcgtaatatctgcggccagcttgatctcgccgccattgctaacagcggcggtcagttccgcctctgtcttgacctctgttgcatccgcccagctgacgctgcacagtgccagggccatgaccagggccagaatggttgctaatacttttttcattgttcattccccttatggtagtagatttccgcaggtgcgctcgttttaatgtgtattaaaacgcaaatgcagaggtacctctgcggatagtcagattatagcacatttacaccgtttgtccagcctttttatggaaattttacacattttttctgttaccgggaataaaaacaggaaaatttggcaggaaatgggcgttgagggcggagaaaatgccgcctgcggcggggcgagggcgttttttggcgctgcggggcagcagggaggatttcgcgcctgcgggcgcgagctgctttcttttcgtgtcgaaagaaagcagccaaagaacgccacttaaggaaagggggatttcgaatttccccctttccttaagaatcctatccccttgaaacgacaaaggagggggctccggccccctccttttgaaaccacccccagggggaaggctttggggggtcagaccttcagatcagtggcggcggcgcgggtgtgctcacgcatggcctgtttggcggccgcgtcatcctgccggtggatagcgctcagtatctcccggtggcgcgccagaatacggcgttccagggccagacacgcgctgtcgttcagcgtctccatctttttcagcagggtgtgctgctccacctggcccaggacatcggtgacgatcatggccacctggttgccggtggcgcgggagagcagactgtggaaacggacgtccagctcagcaaagcggcggtaatcgcccagggcctgctccgccgccgtgaggcagctgtccagcgccgccagatcctcgtcggtgcggcgccgggccgcccagccggcgatggtgccgtcgttgacggcgcggtactcgcccagctcctccagagatatctggttcagctggagcatggccgacagcggctgctccacgccgtcgatggtcagctcctgcaccacggcgccgctggcgccgtgggtggaggccacatagccgccctgctccagcatacgcagggcctcgcggatggtgggacgggaacggtggagctgctccatcatggcacgctcggagggcaggcggtcgccgggcttcagcactccggaggtgataagctcccgcagctggtcatagatggcctcgctggcccgcccgccgccgatgggctgccaggggatatgtacggcttccggcatggaaggccctcctttcacagaaaatacccggacagtatagcgcatcccggggaaaatagcaagggcaggatgcaggaaagcccggaggacggcgccttcgggctttcccgctgtggggagggggatattacttcttcagggctttcatttcctcgatcatcatggggacaaccttgaacaggtcgccgcagatgccgtaatccgccacctcgaagatgggggccacgtcgctcttgttgacggcgatgatgcactcggagtcctgcatgccggccttgtgctggatggcaccggagatgcccagcgccacgtagatgcggggatggacggtcttgccggtctgtcccacctgatggtcggcggtcatccagccggcgtccaccacggcgcgggacgcgcccaccacgccgcccatgagggcggccagctcctcggccagggcgatgcccttctccacgtccttggcgatgccgcggcccacggagaccaccacctcagcgccggtgagatccaccatggcgcgggcggccttgacgatctccagcaccttggtgtggatgtcggcctcggtgagggtaaaggcggggtggatgagctccaccttgctcgcgccgttctcgtcaaactcgcgcttcttcatcacgccggggcgcacggtggccatggcggggcggaagcgggggcagacgatggtggccatcaggtggccgccgaaggcgggacgggtcatcttcaggttggtgttgacgtcaaagagcttggtctcgaagctcatgctgtccacgtccagagaggagccggtgcgcaggaagttgatgtagccgttgagatccacgtccaggtgggtgcagtcggcgcacaggccggtgtggagacgggcggcgcagcggggcgccaggtcgcggccgatgtggctggcgccgaacagcatgatctcgggcttgaactcgtgcaccgcgtcagtgatgatcttggtgtaggcgtcggtggtgtagtccttcagcagggggctgttgtagacgtagaccttatccgcgccgtagccgcccagctccgcggcgatgccgtccacgttgtcgcccagcaggatgccgctgagctgcacacccagctcgtcggccagcttgcgcccctcggagatcagctcaaaggtggtgggcatcatcttgccctgccgctgctcgcaaaagacccacacgccggagaaggccttgggatcggtattcataaaagtagacatatcgtttctcccttctcagatgatgtgcttggcggacaggatgccgaacagctgctccacggtctccttgccgctgccctccagcatcatgccgctgcccttgcggggaggcgtaaagctcttgtagatattggtgggagaacccttcaggccgatggtgtccacctcgatgaggggatcgtccttcagcgcgttgtagtccagcacggtgacgggctcggcgtcgcagtccaggatgccccggatggtcatgtagcggggggtgttcagctccttgatgcaggtcagcaggcagggggtctgcacctgcacggtcatatagccgtcctccagcatacggcggacggtgagggtgtcgccgtgcttctcgatgtcggccacataggacacctgggggatctccagcttttcggcgatctgggggcccacctgggcggtgtcgccgtcgatggcctgacggccgcagaagatgatgtcgtccttgtccacgcccaggttcttgatggcggcggccaaaatctgggaggtggcgaaggtgtcggagccgccgaactcacgggcggacaccagcacggccttgtccacgcccatggccttcagctccagcagcataccggcggcgggcggggggcccatggacacggcgataacggggcagcccagctgatccttcagggccagggcggcctcgacggcgttcatatcatcggggttgatgatggtctgcatggaggcacggtccagcgtgccgtcggcgttgacggccaccttgccggaggtatccggcacctgcttgacacatacgataagcttcattctattcttgctcctttccgcattacttcagcaaattgccggagatgaccatctgctggacctgagaggtcccctcgtagatggtgaacacgcggcagtcgcggtacttacgctcgacggggtactccttgatgtacccgtagccgccgtggatctgcaccgccttggcggcgatctcgttgcacgtctcggaggcgaagtacttggccatggagcagtacatggaggcgttggggtcatttctgtccttcatctgggcggccatatagaccagctccttggcggcggtcagcttggttgccatatccgccagcatgaaggcgatggcctggttcttgcagatgggcttgccgaactggacgcgctccttggagtacttgatggcctcatccaggcagccctgggccagaccgatggactgggcggacacacccagacggccgccgtccagggtcttcatggcgttgataaagcccctgttctccttgcccagcatatcgctcttgtggacgcggacatcctccagcaccacgtcggaggtggcgtagcccaccagacccatcttggcctcgtgcttgccgcaggagacaccgggggccttcatgtccacgataaaggcggagatacccttattgccgcggctcatgtcggtcttggcgtagacgatgcagtagtcggccaggggtgcaccggagataaagcacttacggccgttgaggatgtagtcgtcgccatccttcacggcggtggtgaccatgctgctggcgtcggagccggcgcccggctcggtgaggccgaagacgatcttcaccttgttctccacggagggacggagatacttctccagctgctcgggggtgcccgcctgcatcagggggccgccgcccagagagttgggggtattggcgtacaggctggccacagcagagacacgggcaatctcctcgatcatgatgacataggccagggtgtcggcaccggcaccgccgtattcgcggggaatcttcaggccaaggaagccgcacttggccatcttgtccacgatctcctcgggaaactcgccggtctcctccaccttgtcaaggacctcggtggtgagctcggtctcggcaaactggcggaccagcttgcggatcatttcatgctttgcgtcgaaaatcatagttttcctcctgttaaagtatgggtcactgctctgctcagcaggggatctcgtgcttggacttaccctctgtcaaaatctcatagatgctgttgacgccgcactcggccatctgctccgcggcctcttcggtgaagaaggccatgtggggcgtgtggtacacgttgacgaaggagcgcaggtacttcagcttgaagtagggcataccgggggtacggatgatgtcctcatcgtggggaacgtggatgatgccggtctcgccggggaaggcatccatgaacagcgcgccgaacttgccggactccactgcctcggtgacggcatcgatatccatcagctcgccccgggcgttatcgatgaacaccacgccatccttcatcttggcgatggcctcgcggtcgatcatgccggtggtctccggcagcagcggggtgtggatggtgatgatgtcggactcacggtacagggtgtccaggtctacatactcggcgtacgcacggacggcgtcgttctcatagacatcgttggcgatgatacggcagccgaagccgctgaggcacttgatgatggtgaagccgatcttgccggtgcccatgacgcccacggtcatggtgcgcagctcgcggcccatcttgcccttcagggtgaagtcgttgtcgttggtgttgtacagcgccttcttgaacttgcggatgcacatcaggatggccataacggtgtattccgccacgccgttgggcgcgtaagcgccgttgcacaggcggaagcccagagagcgggcatagccgcagttcatgtggttatagcccacacagcggctggccagcacctgcacgccatagcccttcagctcgtccagaacggcgttggaatagtcgctctggcccagggtggtaacaccgtcgcagccggcggccatatgggcggtggtcttatccagatttgcgggagtggagatcaggtcgatgccatattttttgcacaggttctcgataacgggcttttcgtcgggacgtacttcataagcagcgattttcatgattcttctccttcatattttcgggtggcggcgcgctcctcaacgcgccgcgccctatagtttgcttttcctcaagtcgccggggtgttcgtgttcgtcgcgctccgcctacggcggagagatttttcgttctgccgatggcaaaccggcgatggcgtaccgtgtgtacgtcgagacggtttgacgatggcagggcggaaaatatcccgccgtcagtctttcagggaaggatccatgggcaccgcctcgccggcggcgatcatggcggccacctgctcgtcggtgtagcccaggttcttcagcaccagttcggtctgctcgcccaggtacggaccgcggttatagggcggcagctccgtctcctcgaagataacgggaggccggaccatggtgcgtttattgccgttggaatattccatctcgtagaagcagccggaggcccatgcctgcttatccaccagcagctggtcccaggtctgggccacggcgtagggcagatcgttggcgtccatcagcttgcaccactcgtccagggtgcggctggccatctcggccaccaggaagtcgtagaactcctcgatgttggcctgtaggttggtctggggatagtagcgtggatcctcggccagctcgggatggccgatggcgctcataaagatgggatagtggcggttgtactggggcatggcgatctggagccacttgttgtccttggtcttgtgggccaccaccaggggattgggcagggtacggcgggacagggggtactgggtggtggggtcgccgtactggctggcctgcagcagcagggagacatcccagatggcactgtggaacagggagaccaccacgcggtcgccgatgcccgtctcgcgggcgcggtacagggccgccagcacgccggaggccaggtacatacccacctgatggtcgccgaagccggcgatggtcagcatgggcagggcgtccttgtcaaacagggtgcccaggataccgccgcgggcaaagaaagcggtgaagtcgaagccgggcaggtccttgtcggggcccttctcgccgtagccggacacgaagccatacaccagcctggggtacttggcgtggagcgtctcatagtccagaccggcctttttcagagggttctgccgccagttggtgatgaagatgtccgcctcggcgatgagcttctccagtgcctcacggccggcgggggtcttggtgttcaggcagacgcaggtcttgccggcgttctccagatcgtaggaggtgttctccttctggtcctggggacggccctcgttgacggcggtatagcgcagggggtcgccggcgggagcctcgaccttgatgacctcggcgcccagatccgccagaaagcgggcgcagcagggggcggcgataaaggtggccagctccagcacctttacgccctcgaggggacgctttacttcactcatatcgttcctccatgtatgttaataaatggtgtgttgcttacattttcagcaggtcgcggaaggtctcgaggttggttcgcacctgctcaaaccgcaccatctgacggtccacctccaccagcgtcaggggcaggtcggcggcctcgcaggccttcttgatcatcacatagtcgaactcctccgggtcgcagaacttggtcagcaccaccagaacacccttggcgcttctcgccttggcggtgtccacgatccacttcacccggttcttctcctgatcgtacagcacagagcagttgcccatggcggcgaacttctcggccagcgcgttcagggcgtcatcgcgctccggtgcgtcggtgcggtactggcgggactgggcggccacgtcgtcggccacgatgtgcagacccatttcgtccagaatggcgttcagcgccggggcgtccgtcaggatgccggagatgacgatgggcagcttctccgcggcgggagtcttggcttccagcttctcaatgagcgcctccaccagatcggtgtgctcctccttggtcatgaagaaggcgctcttgaagatgtcgctgcgctgggcggcggtgatctccgggtgaacagccagcagctcgtcgatcttccgcatggcggcgttgtggcggttgtagatcttgatggaggcaagcagcttctcctcggagaaggcgccgcccagcttctccaggtcgcggatcacgcgctcatagccggccttggtataggccacgccgtagacgggcttgcggttctggggataggtcatggggatgaaggggatggacggcacggcgtacttccagttctcgcccacggtcttgagggtatcgcacaaggaggggatgacgatagcggacgcgccctcgtaggcaccgctgatgcccagctccagcagggactggacaatggcgcacaggaaggcgggacagtattccttggcgcggttcagcgctacatcgccgccccaggctcccatagggacgaagcccatggcgtggataagctcctcgggagtgtaaacaggagcgcacaggacgatctttttgccctgcgccagatagccgtccatctgcgcgcggggagaggctgctgcctcatgcagcttgttgaggatgtcgttcatgccttacactcctttcgcagccttgttggcttccatgatctccgtcagaccctgcacacgggtgtcgtactgggcctcggagaagttgcgggggtcggcctgatcgccgtcgaagctgaccacggggatatcgcaggccttgccgatctggcggctcatctcgtacatgaagccgctccacagcttgcaggagcggttggtatgcaccagcataccctccacatggttgtccttgcagagcttgatgcgcttgtcgcggctcatctccaaattgatggcgttgggcaccttgcagtaggcgcggatcatctcgtcaaaggtgttgtagtcgaagccgaaggcgtcggcgtagatcgtcgtgaccatgttgatgccacgggacttcaggccggtgctggtggcacgcaggtacggccagcaggcgatgccctcaaacatgatgcggtacttctcctcgccgcggaaggtggaggtaccgtttttgtggttgtcctcgtactccttcagcagcgtctccatggcgtcggcggcggtggacttgccccgggccgtgaccatgacggccatgtggttcagcaggtcgaagccgttgaagggggacggcacatacctggcgcagccggtggccgccagccaggcgcggctggaacggcagctgaagccggtgacctcctggaacttctcgtcagaccacttcttgccggtgatctcctccagctgcttcacggcatcccagaactggccggtgacgtaggccacctccgcgtcggacacctcatagtcgggattgaaggggatatccagcaggatcatggggatattcagctcacgggccaggttctcgtaccacttgatcatgcaggagcagatgttgctgcagcacagcagtacgtcgggcatggccacgtcctgctcgggacaggacttcagcttggcgtaggccagggacacgcgggcgtaggcgcagatgtcgttggagtagccctcggactccgccacctcgcacattctcgtgcccgcgccgcgggcggcgatgccggcggcctgattttcgggatacacggtggcgatgcccatagtctccgggatctccacagggaagttgctggagacccaagccaccttctcgccccgcttcttggcctcgatggcatccacataggcgtccgccgcgatcttgcccagcttatacttggcggaattgggatccaccggcttaggcaccttcttcacttcttctgccatttcagttcctcctcacagcttttatcgaaacatatttctgtttattcatgtcgtctgcttatatgcccacagggccgcgccgatggcgccgaaatactgggccagcgggtccacactgacggggacgttcagctcgtcgctgagcgcctgccgcaccgcgtcattccgggccacaccgccggagagacagacctgctccgtgacgcccgcccgccgggccagggccgccacgcggctggccacgctgcggcagatgcccgccaccaggtcggggcgcctgacgccgttagccagctgactgatgacctcgctctcggcgaacacggtgcaggtgctggagatagcggcgggggccgcggccttggcggcctcggcatccagatcgtccacatccaggcggaggatagaggccatcacatccagaaaccgccctgtaccggcggcgcacttatcgttcatgacgaagtttaccatcttgccggagggcgacagggcgatgaccttggcatcctgcccgccgatgtcgatgacggtacgcaggtccgggaacacgaagcgcccgcccagggcgtgggccgtcagctcgctgatctcgccgtcggcgccctcgtagtttttgcggccgtagccggtgacaaaggcgcaggccatatcggcccgggtcaggccgctggtctgccacagctgcgccagcgcctcctccggcccgccggtgcccaggccgccggtttggaggctgtgggccaccagctcttttccgtctttaagaacggcgcacttggaagtggtgctgccgatgtcgatacctaaggtgtacatggaaacctccctgaccgggcgcgtaaacggcgccactggtcttaccagtttacttatattatacgggtttgtgaaatttgcgtcaattatgcgaattgccaaagaaataacaattatttgtgcattgtaccgagccgcactttaaatgattaaaactttccggatttttccgggacaatgttgcgttttctttggaaactcgtcatggcagtatgggaaagccgcatggcgcgctcgcgccatgcggctttctgcggttcacggctccaggtcgtgtttgtccagcttcatgttccggtaggccttgggcaggccgggggcgatgaggggaaaggtgttctccgtgtcagacgtgggctgaatgttataggtgccgtacatattcaccaggtcgaagctgctgcgcggtacgccgggaaagtggtggacgtccggtgtagcgtcatagggaaagccctcccggctgcgcttgcgtttgggcataaaaatcacctccggccttagtatggccggaggcagtgggtttatgagtttcagcggtagacctccgcgtcgaagtcgcggacgatctcgtcccgcttctcgtcgcggacgtagacgcagttcgtctcgtcaaaggccaggcgcatggcgaaatccttggcctcgtaaatatcgtttgtctcgaagaagtcgcgataggcctcctccggctcgtggctcttgcgccagataacgtgaaaacgcatagacactcctcctgcaaaatgggggtaatttttagtatacccccgccggaagcaaaaagcaacggtgggttttgccaaaaaacacagtcaaagttcgtcacattttcccccgggaaagttgtgatttcttctttccctgccccacaagatattgtataatagcagacgatattttggagagacagaggtggatcagggtgaagatcggatttgacaacgaaaagtacctgcaattacaggcggagcacatcacggcgcggcgcgcccagttcggcggcaagctgtatctggagttcggcggcaagctgtttgacgattaccacgcctcccgtgtgctgccggggttccagccggacagcaagatacggatgctgcagacgctgaaggacgacgtggagatcgtggtggccatctgcgccggggacatcgagaagaacaagatgcgcggcgacctgggtatcagctacgacgtggacgtgctgcggctgatcgacgtattccgggggctgggcttctatgtgggcagcgtggtcatcacccagtacgccggccagccggcggcggacgcctttatcaagcggctgagcgcccttggcgtgaagagctataagcactatcccatcgccgggtatccctcggacgtggcgcacatcgtgtccgacgagggcctgggcaagaacgaatatattgagacgacccggccgctgatcgtggtgacggcccccggccccggcagcggcaagatggccacctgcctgagccagctgtaccacgacaaccggcggggtatccgggcgggctacgccaagtacgagacgttccccatctggaacctgccgctgaagcacccggtgaacctggcctatgaggcggccacggcagacctgaacgacgtgaacatgatcgacccgttccacctggaggcctacggcaagaccacggtgaattacaaccgggacgtggagatcttcccggtgctggcggccatgttccggatgatccagggcgagtgcccctacaagtcccccacggacatgggcgtgaacatggcgggcttcgccatcgtggacgacgcggtgtgtcaggaggccagccggatggagatcctgcgccggtactacaccgggtgcgtggaacgggccaaggggcaggcggacgagtgcgtggtgcggaagctggagctggtgatgcagcaggccggcgtgacgccggacatctgcccggcggtggcggcctcgctggaaaaggcggaggccaccggaaagccggcgggcgccatggtgctgccggacggcagcgtggtgaccgggcggacctctcccctgctgggcgcgtcggcggcgctgctgctgaacgcgctgaagaagatggcgggcattgaccacaagctggacctgatccccccgtcggtgatcgaacctatcagcgccatgaagaccggctgcctgggccaccgaaatccccggctgcactcggatgaggtgctgatcgcgctggcgatctccggtctgacgaatcccctggcggccatggtgcaggcgcagctgaagaacctgcggggctgcgaggcccacttctcggtcatcatctccgaggaggacgccaagctgtataagcggctgggcatcaacgtcagctgcgaggcgaaatatgaggtcaagagcctgtatcacaagtaaataagcgtctgtgcccgcgccgtgcgcgggcacagctttctgaaaggagcacatatgcagagcatcgcacagatattggcatcggagctgggccagccggtccagtacgtggaaaacgttatcgcgctgctggacgagggcagcaccattccgttcatcgcccgctaccgcaaggaacagcacggctccatggacgacaccaccctgcgaaagctggaggaccggctgcaatacctgcggaacctggacaagcggcggcaggaggtcaagtccgccatcgagggacagggcaagctgaccgatgcgctggcggcggccatcgacagcgccgccacgctggcggaggtggaggacctgtaccgtccctacaagcaaaagcggcgcacccgggccacggtggcccgggagaaggggctggagcccctggcgcagctgctgctggcgcaggagaaggactgtcccgcgccggaggcggccgcacaggcgtacatcgatccggagaagggcgtggagaccgcggccgacgcattgcagggcgccaacgacatcatcgcggagatcatcagcgacgacgcggacatccgcaaggcactgcggggcctgctgatgcggcagggacagctgagaagccttgccgccacggaggaggacagcgtgtaccgactgtactacgactttgaacaggccattcccaagctggcggggcaccagatcctggccatcaaccggggcgaaaaagaggggctgctctccgtcacggtactgctggaccgggaggccgcgctgccggcactgcggcgggcggtggtaaagcccgtctcggcggccatggaattcatcaaggccgcctgtgaggacgcctatgaccggctgatctatccgtcgctggagcgcgaggcgcggtccgccctgacggacagcgccaacgagggcgctatcggacagttcgcgctgaacctgaagccgctgctgctccagccgccggtaaagggccacgtgaccatggggctggaccccggctatgcccacgggtgcaaggtggcggtcatcgacggcaccggcaaggtgctggacaccacggtggtctaccccacctacggcgaacgtcagaagcgggaggccatcgccaagctgacggccctgtgcaaaaaacacggcgtggcgcacatcgccatcggcaacggcactgccagccgggagacagagcagatgacggtggagatgctgcggggccttccgggcgtcagctatatgatcgtcaacgaggcgggcgcgtcggtgtactccgccggcaagctggcggcggaggagttcccggactacgatgtgaacctgcgctcggccatctccatcgcccggcggttacaggacccgctggcggagctggtgaagatcgaccccaaggccatcggcgtggggcagtaccagcacgatatgccgcaaaagcggctggacgaggcactatgcggcgtggtggaggactgcgtcaacgccgtgggtgttgacctgaacaccgccagcgccagcctgctgggctatgtatccgggctgaacggcaccacggcgaagaacatcgtggcgtaccgggaggccaacggcgccttcccggaccggaagcgccttttgaaggttccgaagctggggcccaaggcctatgagcagtgcgcgggctttttgcgggtgccggagagcaaaaacgtgctggacaacaccggcgtacacccggagagctatggggcggcggagaagctgctagccctgtgcggctgcggcgacgaagacgtgcgccggggcgcggtggacggattgatgcggaaggtgcaggccatgggcgaggcaaaggtggctgaggagatcggcgtgggcgtgcccacactgcgggacgtggtgaaggagctgatgaagcccggacgtgacctgcggagcgacctgccggcacccatcctccgcaccgatgtgctggacatgaaggacctgaagcccggcatggtgctcaccggaacggtgcggaacgtgatcgacttcggcgtattcgtggacatcggcgtgcatcaggatgggctggtacacatctcgcaggtgtgcagcaggttcatcaagcacccctccgaggtggtggccgtgggcgacatcgtgaaggtgctggtgctggacgtggacgagaaaaagcaccgcatcagcctgtccatgaagcaggtgaaggaataaaaaagaaaccgcccccggggcggtttcttttttatttgtcttttactcgatgacggggagctttttgaccacggcggcgcagcgggggcacaggtcggggtgctcgctgtcgctgcccacggtgggcaggaccttccagcagcgggcacacttggcgccgttggcggggcgaacggccaccttctgctccgcgtccacgtccacgcggacctgggagacgataaacaggtcggccacctgggcggcgtccatggatgccaggaagccatcctccggcgtaacggtcaggtccacctcagcctccaggctcttgccgatggtcttgttggcacgggcagtctccagcgcgccgttgacggcggtgcggagggcggcgatacgggcccaacgggccatctcgtcctcggagagggcgtagccgttatagggtagcaccatctcgttgaacaggacgttgcgcgcgtcatcgcaggagcgatggggcatggccagccagatctcatcgcaggtaaaggccagaatgggggcaaacagacgggtcatagcgtccaggatcaggaacagggcggtctgggcgctgcggcgggagaggccctcggcctcgtcgcagtacaggcggtccttgagaatatcgaagtagaaggaactcaggtccaccacgcagaagtcgttgatcatgtgggacaccacatggaactcgtagttgtcgtaggcggcataagccttggtcagcaggtcgttcaggcgggtgatggcccacttgtccaggggcagcatctcgcccggctccaccagatgatcggcgtcgaagccggtcagattgtccaggcagaacttggcggtgttgcggaacttcaggtagttctggctcagctgcttgaagatctcgtcggagcagcggacgtccacatggtaatcggagctgccggcccacaggcgcagcagatcggcgccgtacttgttgaagatctcggcggggtccatgccgttgcccagagacttgtgcatagccttgccctcgccgtccacggtccagccgtgggtgacgcactccttgaacggtgcgccgcggcccagagcacccacggccaccagcagggaggactggaaccagccgcgatactgatccaggccctcgatgtacatggtggcaggccagaagccctgatcgcgctccatggcggcaaagtgggtggagccggagtcgaaccagccgtccagcgtgtccgtctccttatcaaatccggcggccttgccgcagtgggggcaggtgaagcccttgggcaggatgtcggcggcgtctctgtcgaaccaggcgttggagccctccttctcaaacagcccggccacggcctcgatgctctcgggggtgcagacgggcttgccgcagtccttgcagtagaacacggggatcggcaggccccagcggcgctggcggctgatgcaccagtcggtgcgctccaggatcatggagcgcatacggtccttgccccaggcgggcacccagcggacgtcctcgcaggcggcgatggcctcgtccttgaagctgtccacggagcagaaccactggggggtggcacggaagatgatgggctgcttacagcgccagcagtgggggtagctgtggacgatgtcctcgctggcgaacagcgtgccgttgtccttcatatcctgcaggatgacggggttggacgcatcggtggtcatgccctcgtacttgccggcgtaggcggtgtgcttgccctgatcgtccacgggcactaccatgtccatgccgtagcgcttgcaggtcacatagtcgtcggcaccgaagccgggtgcggtgtggacgcagccggtaccggagtccatggtgacgtaatccgccagcaccaggcgggaggtcttgggcaggaagggatggtcggccagcatattctcgaagaaggagccggggtgcgtctccacgatctcgtagctgtcgaagccgccgatcttcatgaccttctcgaccagtgcctcggccatgatgtacatctcgccgttgggcgccttgaccacggcgtagctctcgtcggggtgcagggcgatggccagattgccgggcagggtccagacggtggtggtccagatcacgaagtacagcttgctgtggtccagatggcccagcttgccctgatcgtcgtgcatgggaaacttgacgtagacggtggtgcagggatcgtccttatactcgatctccgcctcggccagggccgtctcgtcgtgggggcaccaatacacgggcttcaggcccttgtagatgtgaccgttctggtacattctgccgaacacacggacctcctgggcctcgaagccgggatccatggtcttgtaggggtgctcccagtcgcccaccacgcccatgcgcttgaagccgtcgcgctgcacgtcgatgtagtggtcggcgaactcatggcaggcactgcggaactcagagacgctcatggccttgtggttcagcttgttctgcttgatgatggcggactcgatgggcataccgtggttgtcccagccggggatatagggggtatagtagccgcgcatcgcgtacatgcgggtgataaagtccttcagggacttgttcagggcgtggcccatgtgcagcgcgccgttagagaacggagggccgtcgtggagggagaacaggggcttgccctcgttcttcttcagcagctcattgtaaaggtccagctcttcccagtgcttcagcatctccggctcgcgggcgggcaggccggcgcgcatgggaaagccgcttttgggcatattcagtgtcttcttgtactccatgttgcttctcctttatctgaatagttttgaaaacaaaataaaaagcgcctttgtctcgttcaagagacaaaggcgcggaaaaacgtcctctgcggtaccactctcgttgccgccggggcggccactcattccccacggaatggggcggggagaaggtaacggctcccttgccgtccgcgcttacttggcgagctttcaggcggatgctccggggtgatgttcggtgtccctgtcccgtccgccttgcaccaaacggcggctctcttcgcgtggacatgaggcacggcctgtccccttcatcgcaactttcaatattgctgacaatgtagcacggttttgaaaaaatgtcaagaggaaagcggaaaaaggcggcacacagccgcctttttcagttaaattatccgataatcccgctgggccagggcctgctcccggcgtattttctgggtagccagggcctcctccagggccacgatgatactgttggacaccaggaagccccggggcgtcaggcgccagccgttctccgtccgggcggccagacccgtgcgctcatactgcacgaacagatcctccatgggctggaagcgctggcggtaggtcgtctcgaaataccggcggtcgatgccctccgccgtgcggagagacagcatgacgtactcataatcccgggtcagcgtggcgtcggactcggactccgacaggatcaggcgtccgcttatgtagctgtccaggtcccggacgtaggcgtagcgcacgccgccgaagtcggagtgggcgccgggcccgaagccggcatactcctccatgtgccagtatttcaaattgtggcgggaggcaaagcccggcttggcaaagttggatatctcgtactgctcatagccgttctgtgccagaaccgtgacggcgtagagatacatatccgcctggccgtcgtcgtccgggaagcgctcgctgtcccggcggtcatacaggggcgtgccgggttccagcttcaggccgtagcaggagatatgctccggggccagggcgatgacagcggcgagggtgtcctcccactgctgcatggtctggcccggcaggccgtagatcaggtccatactgaggtttttgaacccggccttccgcacggcggccacggcctcctgcacctgggcaaaggtatggatgcggccgatagcgcgaagcaggccgtcatccgccgactgaacgcccagagatatcctgttgaagcccgcccgacgcagcgcacgcagggccttgacgtcacaggcggagtccgggttggcctccaacgtgatctcggcgtcgcgggccacagggcagcgcttgcggagggtccgcagcagctttgtcaggcggtccggtcccagatagctgggggtaccgccgccgaagtacaccgtgtccacccgatgggcggcagtgcggggcgcgacctcctcgatatggcgcagcagggcggcggtataggcatccatcttctcctcgctgcggggcagagagtaaaagtcgcagtaggcgcatttctggcggcagaaggggatgtggatatagagcccgagaggggctttttctttctgcatatcagcgtacctgaggcggcagtatggtcacagcgccgtaaaagcagttgaccttgcagctgcggcagccgatgcagtcatcctgacggacctcataatagccgtccggccgcaggtcgatgcacttcatggggcagaacatggcgcaccagccgcagccagtgcagctcaccgggtcgatcacggccagctggaccgccttacgcccgaagggatgggcagggtcatgcataactgacgccctcctttcctgagatcaccgtattattatagccgctttcatgggttttgacaagtatagcagcggtgaaagcgacacatattaccggggaaaggatgtgatggcgtgacacctaaggaatatgacgcgctggtacggcagctgtcacccagatcccccatcggcaaggacacggcgctggcctttgtcgtcggcggcgggatctgcacactgggacagctgatcgccaacggctggcaggcactggggctgacgcagcagacggcggccaccgccacctcggtaacgctggtgttcctgtcggtgctgctgacggcgctggggctgtaccaccggctggcgcggtacgccggggcaggcacgctggtgcccatcaccggcttcgccaacgccgtagcctcgccggccatcgacttccgggcggagggcatcgtcaccggcacggcggtcaagatgttcactgtggccgggccggtgatcgtattcggcaccgctgccagcgtggtgtatgggctggtgctgtatctgctggcatagtgtgagcgccggcgctgccggtcacgaccgtgtccgcccgtacacataaaaagccgcctttcggcggcacatgaaaaaagaaccggcctctagccggttctttttgctcggttcagatgtactgcttcatgccctcggtggcggtgtcctcgtccgcgctgatggtgacggtgaacttcacgccattctcctcgctgaagcggtccagccagtgaaggaacgtctctaccgcctgcaggtcgttgctgccggcgatcttgcagagattatccacgaacacatgggaaatatcgtaattgcccgcgtacataccgcacaggaatccgcgcaggcagtcaaaagaatccacattatactcgccggcgttgaccagacggacgttgtagctgacgtcgtaggtcatatcgcccttaggctcgatgcacacgacacttccggtctcggactccacactggtgtggatgagctcgatgagctgcttggtcttaccggcaccgttggcccccatgatcagtctaaccataagaaatcactcctttgtcattggtggtttccacctgagtacagcataccataccggtggaaaaatagcaatgcagaaaaagtaaacttatttttgggcacttttacttttccagcttccccagcagcgtctgccgcaggtcctcataccccggcttgcccagcagggcgaacatatttttcttataggcctccacgccgggctggtcaaaggggttcacgtccagcaggtagccggacaggccgcaggcgtactcaaagaagtagatcagcccgcccagggtctgctcattgacggatcctgtccgcagcgtcacgttgggcacgccgccctccacatgagccagcagcgtaccgtccatggcctgctggcggataaagtccatgctcttgcctgccaggaagttcagaccgtcgccgttgccctcgtcatagggcacggggttttcgttttgagaggggccgaagcgcaccaccgtctcgaacaggtggcgctcaccctcctggatgtactggcccatggagtgcaggtcggcggtaaactccacactggcggggaacaggcccttgttctccttgccctcgctctcgccgtacagctgcttccaccactcggacataaagcggaagcagggctcataggcagccagcagctcgatcttctttcccgtgcggtacagctcataccgggcgccggcatactgccaggcgggattggcgttcatgtccgccaaggcacattcgcgcatcatatccgccgcgccgtccatcagcgcgtcgatatcgatgccggccacagcaatgggcagcagacccacggccgtgagcacactgtaccgtccgccgatgttgtccggcaccacgaactcttcgtagcccttatcgtcggccaggcccttcagggcccccttgtgggcgtcggtggtggcatagatacgccgggcggcctcctccgggccgtacttcttctccagcagctcacggaaaaagcggaaggccacggcgggctccgtggtggtaccggacttggagataacgttcacggagaagtccacgccgtccaccagctccatcacctcggtcagcgcgtcggagctgaggccgttgccgataaagtaaatgttgggcgtattcttctttttcaggttgtaattgggcgagcgcaggcattcgatgacgccccgggcgcccagataggaaccgccgataccgatgaccaccagcgcctgggaatcggactgtattttcttcgccgccgccttgatgcgggcaaattccgccttgtcatagtcctccggcagacgcacccagccggtaaattcgccgccggcgccatcaccattttgcagatggtcatgggcgatacgcaggcggggggacagcgcggcctcgtagggcagtgggataaagctgcggatattttgcagatcgacctgtatcatgttaaaacctcctcgtcggtgcaatgcaactatttgccctatcgtacaacgtttccggcgaaaatacaaggggaaaaacgggacttccccccgcttttcccctttccgctacgccaggaacaccgcctgcttcaaaagatcggtgaacatccggccccagctgcgccccggaacgctctccgccgccagaatgggcaccgtcagcacctccgtatcgccgctgcacagggtcagcgtgcccacctgctggccctgctgtatcggggccgccagcgtctccggcaggtccacccgatactccagcgacgatgcctgtgccttctccaccacagcggtaacgcccgtctccggcagcgtcaggcttacctgctccgcctcccccatggtcaccggcagggcaggcagcggttcctccggcgcggcggagaccagcgtataggcggagaagccgtaattcaacagcgccttggcgtcggtgttccgcttgtcggccgtctcccccttcatgaccactgcgatcagctccatgccctcgcgctccgccgtggcgctgatgcagtagcctgcggaggcggtgtagccggtcttcagccccgtggcgccgtcgtaccagcggatgagcttgttggtattggccaggtcgaaggtgccgtttcggatgctgtccgtccatatggtggtgaaattgcggatgtccgggtgctttgtcagcagctcacggctcataagggcaatgtcataggcactggtgacgtggtccgccgccgtcaggccggtgggattggcaaaatgggtatcgtccatccccagccccctggcgcggttgttcatctgctccacgaacagctccgtcacgccggcgaccttctccgccagcgccaccgccgcgtcgttgccggaggacacgcacacgcatttcagcagctcctccacggtgatctgctcgccctccgccagaaagacctggctgccgcccatgccggcggcgttggccgacaccgtcaccacatcgtcataggccagcgcgccgctgtcgatggcgtccatggtcagcagcagtgtcatgatcttggtgacgctggccggctccagcttctcatgctcgttttgggcgaacagcatctgtcccgtggtcttttccatcagcaccgcggcgcgggaggtcagcggcaggtccaccgccccggcgtgtaccggcagcacagcggtgatgcacagcgccgccagcagcgctgtcagttttcgtttcatagcgtcccctccaggcttttttctatgggtatgcggcgggacaagacgttcatgccctttcgacacaattttcggttgcaaaaccgccgccggtatgctacaataacccggtaagtaaatcgcagggttggtatatcggtattacagcggcttcccaagccgttaaggcgggttcgactcccgtaccctgctccaaaaagaaaacaccatccgtcaggatggtgttttctttttggagcagcacttttgctacgcaaaagtgaccgcctgcgggcgggtgattgaacgcgagtgggggaacccgtcaaaggttccccccctcacactcccccttccttgcggtgggcgggagtgcagacaacaaaacctgtgggcacccacaaaaaaagagacgcccgcgggcgtctctttttttggagcagggcatacgataccgccgggtaaaaaaggagggcggacgccgcgcgtccgccccaagtgaggagaaaaaacaggacccttgcggcggtgactgctcacagccgccgcgataaaaagggcagaaacagcggaaaccgctggaagtaagctgatacagcatccgcaggccacgggaccgcgacgatcaaagcagcgcagccagcagccacaccagtccgcaggcgcacgcgccccataccgcccacagccatgcaggcggacgccaccggcggcgaacgccggtctgtccccgggcgtagctgcgggcgatccgcaccgcctcgtccaccagctggcgggagctgacgccgccgccgtccgtgggaaggatgaaaatagcctgctcgaatatccgcgggtcgggagagtccacgacgatcacgcggcgggaaacgccttttaccaaaaccgatgcctccttcagccgtgacgggcgctgtttgttacagccatagtatcgccgtggcggcggaaagttatacggcgcggcgggcaaaatttcccgccgttttttgtcgctcagacgcggtgcgggtccgccttgccgtcgatggccagcaccagcacggcgcagtcgtccgcgccgcccgtccgctgaacggactgacggagaagctcctccgccagcgcccggggcgaggtgccgtcccatccggccagcaggtcctggagccactcgtcgtcctcgccggccacaccgtcggacacctgcaccagccaggtgcccggcgataccgccacgcgctggggcggcacgtcgccgtcggcgctctccagtcccgcgggcagcgcctgcgcgcgatagcgggccacggtgccctgccgcttgatatacgacggcgcggcaccgtacttgtacagcgtcagcacgccctcggcccggtccagacaggccaggtcgatggtcgtgaagccggcgcctccctgacagcggagcatggcagcggtgttcagggtcttcagcgccgggagaggttcgatacccgcctgcaaaaactgccgcaggaggcggatggtcatagcggcctcgcagtgggcgctctcgccgctgcccataccgtcggacagcaccagacaagtcagccctccggcatcaaaaacggcgcactgatcgccgcagtgcttttcgccggtctttggccgcagcagggcagcggtgcggcaggtcaggtgtgcgcggcggagccgttccgccggggcggtccgtgacagcacctcggccacctgccggtactgctcccgggccagacgataggccgcatccagccgcccgtggtgcagcctacgctggaggaaatcatgtagctgtccgtccagcgcccccagcagtttgggaaagcgtacacagcgatccgcaaagtacggcgggaaatcctccgccagcgcctgtccccgccgcaggagcgccgggcaggcgtcgttgaaggcgttgtacgtgtcggtataatgggtctgccagcagtcgctccgcaggggacagtcccggcagacctgctccgccgcccggtcaaacagcacggcggggttctccggccgcagcagcggcgcgtggtcctccaggctgtcatacaccgcccggaaggccgccgcaggtgccgcagcctccggagacacctctccggcggccgtcagcagcatcccctccttttccggtagcagcagccacacaccggcagcggtcagcagctggcacagcaccgccagagggcggacctcccccagcagcagggccgccagcacacccgcggcgcagaaggccgcagccgccggcagtctttgtccgccccgcagccctgcggcagcggacgcggcggcgcacagcaccaccgccagatacagctctcccgtgccacacaggtccagcgtcagccccgccagcgcaccggcggcagctgcgtcgggcgccggcccgcggcccacgaaatatagcagcagcaccgctgtcagcacagccgccggtgaaaatcccatcaccgtccagcccgccggcacggcgcatacccccagcagcagcaaaaaccaggcccggcgcttgtccgcctgctccgccgccgactccggcagcagatcgggcagcagcgccgccgcgccatacagcagcgccagcgccgccatgcacagcgcccattgccgtccgccccgctgtatgagatacggcagctgggtcagcccggcggcgcacacagcggccataggccggaagcggggccgccggtacagccgcgtattgcacagcgccgtgttggcgcagaagatcagcagcgccgcggcggtatgccgcagtcccggctgaaagtccatgaacagcagggcgcccagccccgcgcagaccaccgccagcaggcccggccatcccacgccggccgccgccaccgccgccagtgcccagggggcgtactgcccgccgggggcggcggccgtcagcagcagcgcggcggcacagccgcccacagccgcccagggaatacgcagggcggtgcgctgtaccgccgggagcagatgtttcatggctcgtccctcctttttccgttattgtaaacggctaaaggcgcgatttccgtcgggaaatggcaaagggctttgatttttcggcccaggggtgaaaagcgtcggtctgcccttgtaatttttcgttgtatttggtagaataacgtaagcataaggggaacactattccccgcacagaggaggtaacaccatgataaagaagcttgcagccctggcgctggcgctgctgatgaccctgtccatggccgcctgcggcgaccagaaggatgaccaggcgggcggcgccgtgacccccggcgtgaccggcgatgctgttcccgatatgggcactgtcagcggcggcacctacaccaaccgtttcgccggcatcagctgcaccctggacgacagctggtacttctacaccgatgagcagatcgacgagctcaacggcttcgtccgcgagagcaccagcgacgaggagctgaagacccgcttggagagcagcagcagcgtgcaggatatgtacgctgcctccacggacggtctgatgaccatcaacgtcgtattcaccaacatgggtctgctgggcggcagcaccgtgacgccccaggatgtggccgagctgtccgtggagcaggtccccgccgcgctggagagctatggcttcacggacgtgacggcccagctgaccaccgtggattttgccggtcagaagaacgttcccgccgtggccgtatccgccatgaacggcgacatcgccacgtatgagctgctggtatgcctgaaggcgggcaattactccttcagcgtgacgctgtgcagcttcaccgaggatgtcaccgccgacatggccgccctgttcaccgccgtgcagtaacgccgcaataggaaaagaccgtgcctctcggcacggtcttttttgttaccatgtggcgcgggcagtgagcacattgcgcttgtaagtgatgcggaagtagatatactccgccacgccggtgagtatccaggagaacatatacagcagatacagggacgtgatcgtgtggaagtaggcaaagatggtgtagatccagatgacccggaacacgcaggagcccagaatgaccataacggtgggggccacgctgcggcccaggccgcgggaggcggcgatactggcgtccatcagggggccgatccagtaggagaaggccatgatccgcaggcggtccacgccggcgtcgatgacctcgggcttgtcggcaaacaggcccaggaactcccggccgaagacagtcagcagcacgccgaccagcacgcccacaacggcggcgtacagcatactgatgtagtagctcttaaggatacgctccttccgccccgcgccccagttgcggctgacaaagctggcgcaggcggtgtagaacgcggccatcatgttgaacaccagcgtatcggcattggcggcagccgccgcgccggaaacggtgatctcgtcaaaggagttcaggcccgcctgcacgaacaggttagccacagcgaagatagcgttctgcaatccggaggggataccgatcagcagcacacgcttggaggccaggtggtgcagccgcagcctgcggatatccagacggcaggcgtccttgcggtgcagcagatggatgataatgagcagggcagacacccactgtgcgatggcgctggcgatagccacgccctcggccgccatgccgcagccgataacgaacaccaggttcagtatcacattcagcacgcccgccaccgtcagatacagcagggggcgcttggtgtcgccggtggcgctgaggataccgttgccgcagttgtagatgcccatggccggcaggcccagggcatagagcttcaggtacagcaccgcaccggggaggaattcctccttggtgtgcagcagccgcagcataggctcggcaaaaaacacgcacaccaggcacgtcagcacgcccatcgccagacagatcaggaaggaggagtgggtggtgtgctccacgtcctcgtcattgcccatgcccagcccgcgggccacagccacattgacgccgccgcccaggccgatcagcagtcccgtgaacagcgtgaccagcgtggtggtggagcccacagagcccagggccacataggtgttgtacgcatacttgccggcgatggccacatcgctgaggttgaacagcacctccagcacctgggtcatcatcagcggcaagctgaacagcaggatatttttccaaagtgaaccggaggtcatctccacagtgagagccctccggcgtgttgcagtcttcatgcccgcaccctcctatacaatacatatcacatagaaacatccgaacgtgattgccagtataacacggcgcattacacaaaacaaccccctttcgacacaatatttttttatatccggtgccgtgctttttgtgcatagtgcatagataagctttcaggttttgggcacatcgtcaaatgtgatgctttgtcccccgtctctcgacggaatttgacagccacggcagtctccgctataatgttagggagtctggccgccccctttttcgacggccgcaaggaggtccccctatgaaacgtatgctcaccgcagcgctggccctgctgctggcgctgtccctgtgcgcctgcggcgcgcaggatacggacgatacgcccacctaccccgccgccttctccggcttggagacgctgatcgacaccgcccgcgaggagggccgcctgaccgtgtgcggcaccggcgacgaggcgtatatgacggccctgtgcgaaaagtttgaagagctgttcgacatcaagaccacttaccgcgccattaccgccgcccaggcgggcagcgcccggggcgacgtgtggttcggcggcagcgcggatacctgccgcaccctggccgctgacggtaagctgctgacctatacgcccgtccacgccgctgacctgaccaacgccgcctatggcgatgcggacggctattggtacggcgtatccgtcgacgcggtcgttttcgccgtcaacagcgacgtgctccggcgcatgaccatctccgcccccaaggactgggcagatctgaccgacccggtataccaggagctgatctggctgcccacctaccgcagcacggagatcggccatctgaccgcgtacagcgccgccctgcggctgggccgcgacaaggggctggactatctggcagcgctggacaccagcgtgcagttctataccgccgcggatgacaccttcgtcaagtgcctgtccaccggcgagtgcgtcatcgccgtgggttggctccacgatgggctctccgccctgtccgctgacacctccggtgacctgcatctgataattcccgcctccggtaccttcggtcaggtcaccgccagcgccattttatccggcgccagccataccgctgctgcccagctgtggcaggagttcgttctctccccggcctgcgccgatctggcagaggcacacggcgactatcgcctgcccactatcggcagcgccgacctggtccagcgcaccggcgtgacgctggaccccgccctgctgtctcccaccggtgacgccgacaccatcgaggataaggagacgctcgtctccgaccttatcgaaacactgaccgacaccggcatcaacaccgaggataccgcccgctggaatgtggcatagattcccgcaggccgtctcttacgagatggcctgctctttttctacgcggtcactctgcctcttgcagcagctcctccggcctcacgccaaagagcttcgccagcgccagcagattggtcgtgctgggatccgactgcccggattcccacttggataccgcctgtcggctgacacccagcgcctccgccacaaactcctgcgtcattttgcacgccgtccggcgacgcttcaatgtctctcccaatgttttggcctgttccgccttttcctgccgcagcggctcggaccgaatgtatttccgcagcgccttgatgatcagaaacaccacgtatgccagcgccgcccataccggaacggacagcagaaagagaatgatcgtcgttttcatagtgatgccctccttttctgccgccagtataacaaaccgatcacggttgcgccagcaactatcgcgcaacccttcagtaaaacgccatgttccctacatagaagtaccatgtatgttacatgggtgtacccgtttttatatgaaaaaatgaccacccgatcgggtggtcattttggcaggggcagaaaggctcgaactctcgacacgcggttttggagaccgctgctctaccaactgagctatacccctatgtggtgggccttcggggactcgaacccgggaccggacggttatgagccgtctgctctaaccaactgagctaaaggcccaagtctacgctggctttctgagtaaaagaaatgagccgccaccttttcggatggcggctcacccttcgtggctccccctgttgggctcgaaccaacaacccttcggttaacagccgaatgctctaccattgagctaaggaggagtgttggcgctacctatcttcccgggccgtctccagccaagtattgtcagcagaagcgagcttaacttccgtgttcgggatgggaacgggtggaccctcgccctaatcagcaccaactattcaattgaaggtttgcaccttcaaaaccgaacaatgaagaagtgaacggagaaggctaagattgcctgcaaattgtaggtcaagccctcgggctattagtaccggtcagctgcacacgttaccgcgcttccacctccggcctatcaaccagatcgtctttctgggcccttactccataatggatgagagatctcatcttagggagagtttcacgcttagatgctttcagcgtttatctcgtccgtacatagctacccagctatgcccttggcaggacaactggtgcaccagaggtacgtccatcccggtcctctcgtactaaggacagctcccttcaaatctcttacgcccgcaacagatagggaccgaactgtctcacgacgttctgaacccagctcgcgtgccgctttaattggcgaacagccaaacccttgggaccgaatacagccccaggatgcgacgagccgacatcgaggtgccaaacctccccgtcgctgtggacgcttgggggagatcagcctgttatccccagggtagcttttatccgttgagcgatggcatttccactcacataccaccggatcactaactccaactttcgttactgctcgacccgtcggtctcgcagttaggctcgtttatgcgtttacactcaatgcacgatttccgtccgtgctgaacgaacctttgagcgcctccgttactcttttggaggcgaccgccccagtcaaactgcccgtctaacagtgtcccccgacccgattcagggccgcaggttaggaaaccagcaatccaagagtggtatcccaccggtgactccacacgacctgacggccatgcttctcagtctcccacctatcctgtacatgaattaccgattcccagtattaaactgcagtaaagctccatggggtctttccgtctagttgcgggtaactggcatcttcaccagtactacaatttcgccgggcgggctgtcgagacagtgcccaaatcattacgccattcgtgcgggtcagaacttacctgacaaggaatttcgctaccttaggaccgttatagttacggccgccgtttaccggggcttcaattcaaaccttcgcttgcgctaagctctcctcttaaccttccggcaccgggcaggcgtcagcccatatacgtcatctttcgatttagcatagacctgtgtttttggtaaacagttgcttgggcctattcactgcggcctctttcgaggctccccttcttccgaagttacggggtcaatttgccgagttccttaacaacccttctcccgttggccttaggattctctcctcatctacctgtgtcggtttgcggtacgggcaccttagtgtacaccagagcttttctcgcctcccagcatcgcggacttccctactatatttcggtcccttgcgcccagctctaccaacggctgggtcccgctatctgaaagtgtccttctggtttaaagttcggtggctacggaatttctaccgtatgtgcatcgactacgcctcgcggcctcgccttagctcccggcttaccttgggcggacgaaccttccccaagaaaccttagattttcggccattatgattcccacataattctcgctactcattccggcattctcactcctgtacagtccaccgctgcttccgctgcgacttcaccccgtacacgacgctcccctaccacgcccttgcggacatcctaagcttcggttgcatgcttagccccgttatattttccgcgcagagtcactcgaccagtgatctattacgaactcttttaatgaatggctgcttctaagccaacatcctggttgttttcgcaactccacatcgttttccacttagcatacatttgggaccttagctgtaggtctgggctgtttcccttttgacaatgaaacttatctcacactgtctgactgctgatcatcaattagccggcattcagagtttgatagggttcagtaagcttatcgccccctagcccattcagtgctttacctccggtaatctaaatcaacgctagccctaaagctatttcggggagaaccagctatctccgagttcgattggaatttctccgctaaccacaagtcatcgccggtcattgcaacgaacgtgcgttcggccctccatgagattttactctcacttcagcctgctcatggttaggtcacccggtttcgggtctatggcaacgaactttatgcgccctattcagactcgctctcgcttcgcctccggtactgaataccttaagcttgctcgttactataactcgccggaccgttctacaaaaagtacctcatcacacattaacgtgctttgagtgcttgtaagcacaaggtttcaggttctctttcactcccctcccggggtccttttcacctttccctcacggtactgctcctctatcggtcatcaggtagtatttaggcttggatggtggtccacccatcttcccacggggtttcacgtgtcccgcggtactctggatactggctgtcagtcttctctttcaaatacggggctctcaccctctatggccggccttcccatgccgttcttctagatacctctgatcgtgatgccagtccgaaccccggtgaataaatccaccggtttggcctcctccgcgttcgctcgccactacttgcggaatctcggttgatgtcttttcctgcccctacttagatgtttcagttcagggcgttcccctcgtacgcctattttattcaacgcacgataccagagtattgctctggtgggtttccccattcggaaatctccggatcaacggatatttgctcctccccgaagcttatcgcagcttgtcacgtccttcttcggctcctgatgccaaggcattccccttgcgctctttatagcttgaccttgaggcgacgcggattgcatatccttcgttctgttgtaaacaacagaactcatacattccatcgcgtcgcctcttcttcgtttcacaaacgcttcgctggtttgtgaaacgacacttaaggtgacgcttcgcgtcgactttcgtctaagagattttggttctcttgaattatgcaggcaatctacaggttacttcgcaaaattgtaattgtatacccacatcttttcagatgttccacaattaaatgttttacaaacttcttccaactttcgttgaaagacctctctgttgccttgctttcatcacattcttcattgttcagttttcaaggtgcaatttccagtctcgcttgaaaccagatcgaaacgtacaacctcttgtccgcttccatccatcttcaattcgaaattggtggagatagtcgggatcgaaccggcgacctcctgcttgcaaggcaggcgctctcccagctgagctatatccccatctatctcttttagactgttggtgggcccgagtgggctcgaaccaccgaccttacgattatcagtcgtacgctctagccagctgagctacgggcccatatccacagcccagggacttgtgccctctaaattaaacaacgaacgcgcgctgtgctttgcacatcgccgcaaacgctttcgcgtttgcccagacgtctgaccaggatgtccgccagcgtttgttccgacttttgagtgaattatatgtcgcgctgcgcgcgccatgtaattgctgtcggcactgacaggtctccttagaaaggaggtgatccagccgctcgttctcgaacggctaccttgttacgacttcaccccaattatcgaacccaccttcgaccgcgccctccgttaggttaggctacgggcttcgggtgttcccgactctcatggtgtgacgggcggtgtgtacaaggcccgggaacgtattcaccgcggcatgctgatccgcgattactagcgattccgacttcacgtgggcgggttgcagcccacgatctgaactgggacggcttttaggggttcgctccacctcacggttttgcatccctctgttgaccgccattgtattacgtgtgtagcccaggacataaggggcatgatgatttgacgtcgtccccaccttcctccgttttgtcaacggcagtctcgctagagtgctcttgcgtagcaactaacaataggggttgcgctcgttgcgggacttaacccaacatctcacgacacgagctgacgacaaccatgcaccacctgtctctactttccccgaagggcacctgatgtatctctacttcgttagtaggatgtcaagccctggtaaggttcttcgcgttgcttcgaattaaaccacataatccaccgcttgtgcgggcccccgtcaattcctttgagtttcaaccttgcgatcgtactccccaggtggaatacttattgcgttagctgcggcacgcagggggtcagtccccgcacacctagtattcatcgtttacagcgtggactaccagggtatctaatcctgtttgctccccacgctttcgcgcctcaccgtcagttgtcgtccagcaatccgccttcgccactggtgttcctcctaatatctacgcatttcaccgctacactaggaattccgattgcctctccgatactcaagaagagtagtttcaaatgcagttcacgagttgagcccgtggatttcacatctgacttgccctcccggctacacgccctttacacccagtaaatccggacaacgcttgccacctacgtattaccgcggctgctggcacgtagttagccgtggcttattcgtcaggtaccgtcttctactcgtccctgacaaaagaagtttacaacccgaaagccttcttccttcacgcggcgttgctgggtcaggcttgcgcccattgcccaatattccccactgctgcctcccgtaggagtctgggccgtatctcagtcccaatgtggccgttcaacctctcagtccggctactgatcgtcgccttggtgggccgttacctcaccaactagctaatcagacgcgaggccatctttcagcgataaatctttgacataagtgccatgcgacacctatgtgtcatgcggtattagcagtcgtttccaactgttgtccccctctgaaaggcaggttcctcacgcgttactcacccgtccgccactgtcctctgcttcaattggacgaatcctctttccacagattctcgttcgacttgcatgtgttaagcacgccgccagcgttcgtcctgagccaggatcaaactctctataaattgtatctaaacggccatgccgttcaaatctttacagagctatttgtcatagcttcaaaaactttttatacttaccttcccgggtaattgacttaaccccgttccggcaagtttctcagttgcacatcttacaatgtgctcccgtctggtgcttttcgtttcgttcgttgtttaatttacaaggtacacgtcccataaccgcggaacagttgatatgatactacttgcggccggatttgtcaacactatttttaaattttttcgaattttttgtatacggcaatgtaatgacttttaacgcaagtcatgctatactttaaataatattttatgaacttttaaaggaggatgactccgtggatattctgcacctgaccggcaccttcggccgactggaccacagcgaattatcgctcgcgccggggctgaatgtgctgtacgctcccaacgaaaccggcaagtccacctggggcgcctttatccgcaccatgctgtacggcctgtccacccgcgagcgcgggccgctggcggacaagaaccgctatgcgccctggaccggcgcgcccatgcagggccgcatggacctgacgacgcacggggatgcctgcaccctgctgcgggagacacgccgcgccgcatcaccgctgggcgagttttcctgcacctacaccggtaccggcacgcccgttccgggcattaccggccagaacgccggcgaggtgctgctgggcgtgccccgggaggtgtttgagcgcagcgcctttatcggccagaacgctctggccgtggaccaggacgccgagctggagcgccgcatcgccgccctgatcaccaccggtgaggaggacacctcctacaccgaatcctacgaccgcctgaaaaagcagctgaaccgccgcaggcacaacaagacagggctcatccccgccctggaacgggagaccgaccagctgcgcgccgcgctggcggagctggacgcgctgaacgaccaggcgcagcagtcgcgccgggagctggatgctctggagcgccgcgccgccgacctgcggcagcagacggctcagtggcaggcgctggctgctcaggagcaggccgacgcctgtcagcaggcggcgcaggcggcactgaccgcccaggcccgggccgacacgctggcggccgactgcgccgccctgccggacgatgcctcgctgacgctgctggaggggcaggccgccgcacttcccggtgagctgtccgccctgacggaaaagcgcagcgccgcggaggaggccgcacaaaccgcgcggcaagccaagaaagctctggaacagcaccccctttaccccgccgcagaaccggagctgcggcagcgcgccgaagccatccagcccgataggactccctctctgctcctggtcctcttccccgcgtcgctgatcgtggtcgccgctgcgctggcatttctgttccggacgcagcagccgctgcccttttggctgttcatcggcatggcggggctgggcatgatcgccacgctcttcgctgcaaggtcccgccgtcaggccatcgtggaacggcataaatacgccgaaacacagcgcgccgcgctggagacccaaatcgcagaatatctccccctgcggcagcaggcagatgaggccgccgaggctgcccgccgggcggaagtctccgccgcggacagtgaagatgcctgccgccgccggctgtgggatctgctgacccaggtacgcgtcttcgcccccgccgctgccgatctgtccggcatacagctggccctgtcagacgcccggcgccgcaagaccgcgctggccgacgcccggcagacggcccgggaagccgccctgtaccgggatgccctgcgggtgcagctgccggaacagccggccgccgaaagctctatccagcgccctgcgctctcacgcgaggaggccgccgcggaattggcgcgcacacagacgctgctggcgcaggagcgcacccggttcgacaccctcaccggccgcatccgcgcgctggatcgctccagcgatctggaggcccagctggcgcagaagcaggagcagctaaccgccctgcaggatgaatatgatgccatcgcgctggccatggacgctctgtcacaagccaacaccgtgctgcagaaccgcttttccccggcgctgggcgcacgggcggcggagatcttctccgccatcaccggtgggcgctatggccgtgtgctgctgagccgggacttctccctgtccgccgagcccgtcggcgacccggtgggacgcagcgtccgcctgctgagtcagggcaccgccgaccagctgtatctggcggtgcggctggccatctgcgacatggtgctgcccgccgacaagcgggtgcccctcattctggatgacgcgctggtgaccttcgacgacgagcggctccacgcggcgctggactatctgctggaggaaagccaaaggcgccagatattgctgttcacctgccagaagcgggagatggcctatctgcaaggcaaggaaaacgtgaccgtcacgaagctgtgaggtcgggatatgcatatttggacaattactgattgggaaaagaaccttccagataattccctcagaagaaccggcttgcgatttcgatacgacaggaatacgcaccccgaagtaaaacgtgcgtgcttacaattcgcgatttggctgagaacccaatattactttccgctaagagtcgttgtttatgtcaaaggagcaaaaaccattcgcacaaaagatggcgatcatgtagtaggaagcttttttgaacctttttcatactcggatgagccatatatccgaattgcagcgggtgattataatgaattagcgaaccatttagggaaagacaatgccctggcgtcgatccttctttccttggcccatgaattgacgcattactatcaatggatcaataacattcaactaacgcctgtaggcagagaacggcaggcagccagatacgctaactatatcatagatgaatatgcgtcaaccagagaacatccttagggcgcgcaggggcggcgtcccgcaaagaatgcgtaggggcggacgactctgtccgcccctacgaaagggcaaacggatgccccctacaacgcactcaagagggcaccgcactctgtccccccttgcaaatcccctcaaatcgtgctataccatatataaaagagcgaaaggaggctgccatgccccactttgactgtctccgctgcggcacggccatgcagttcgtcggccagcacaagctgcagctgggcaagaccagctggatattcggcgacctgcccaacctgatggccggtgcgctggacgtgtccattatggcgtgccccgcctgcggcaagctggaatttttcaccggcggcgttccccagcccagcggcaacgaccccggcctgcaccagcgccggtgcccaaaatgtggctttgcccacgatttcgactaccccaaatgtcccctgtgcggctatgtctacaccgccggggacgagctgtgagaatttttaaaaggagaacctgttatgagcgattgcacccacgattgcagcacctgcggcgaaagctgcggtgagcgcaaggaagtaaacgtatttgagaaaaagcccctccgccccggctgccgcgtcggtaaggtctacggcgtggtgtccggcaagggcggcgtaggcaagtccatggtcaccagccagctggcggtggcgctgcggcgggagggctatcgcaccgccattctggacgcggacatcaccggcccctccatccccaaggccttcggcatccacggccgggccgtggcgcagggcgacgccatcgcgcccgtgaccaccgccaccggcatacagctgatgtccgtgaacctgctgctggagcacgagacggacccggtcatctggcgcgggccggtcatcggcggcgtggtgcagcagttctggggtgataccctgtggaacgatgtggattatatgttcgtggatatgcctcccggcaccggcgacgtggcgctgaacgtgtttcagtcgctgccggtggatggcgtcatcattgtggccagcccccaggacctggtatccatggtggtgcagaaggccgtgaagatggcgcagatgatgaacatccccatcgtgggcctggtggagaacatgagttacgtccagtgtcccgactgcggcaagaaactctatattttcggcgagggcaagaccgaggaggccgccaaggcgtaccacatccccctgctggcgaaaatgcccatcgacccggcactggctaagctgaccgacgacggctgcatcgagcagttcgaggggcactggctggacggcgtggtggagaccattctgcggaaataagcaaaaaaagaagcggcgcggtgcgccgcttcttttttgatcttatttcatcagctcctgcaccagcgtcaccaggccgctgacacccacgccgatgtacaccacctgccgggccacgtcgccggacatcttccggctcagccgtgtaccgatccacagccccagtaggatgcacgccattcccagccccgccaccggcagcagcgccgcgctgaaataaccccgcaccgtccgcatggtgaagttgatgaggttggtggtgaagaacaggaactgcatattgcctacatacgtctccttgctccgggcgatggcgacgaaatacagcgccatcataggcccgccgatggtgaacgccccggcgcagcacccggagaaggcactgcacaccagccccgccgccaggccgggctggtccagcttcacccgcttggcaaaaagcaggaagtacgccgccagcacgatcaggaacgccccgaacagcgccgtcagcacgtgcaggtcgaaattccccagcagattgatgatgaccagactgcacacggtgtacagcccgatgggcagcgcgatctgctttacatcgatgtgcttgcggtacatccacgtcatggtgccggactgggccatgcagatcagcgccacgatggtgggcgcaatggtcatgtcgtaaaacgcactggccgccaccatcataatgaccgccgcgccaaagcccgtcagcggctggatcacaccgcccgccagcgccgccagccccatcattgcgtattccaccgcgcacaccgccttttctgtcatattcccggctattataacaacttcacgcaggaaaggcaatccgcaaaatgaacatcccccggcctgacggccgggggatgtttgttcagctcttctttttacccaggtaggcttccttgatggactcgtccgccagcagctccgcgccggtgccggacttggtgatgttgcccgtctccagcacataggcgtagtccgcgatcttcagcgccatgttggcgttctgctcgatcagcagcacggtgacgccctgctcgttgacggtgcggatgatgtcaaagatgccctgcaccaccagcggtgccagacccagcgacggctcatccagcatcagcagcttggggcggctcatcagcgcgcggcccacggccagcatctgctgctcgccgccggacagcgtaccggccagctgccagttgcgctcctccagcctggggaacagctcatacacccacttgatgtccttctcgatgccagctttgtccttccgcaggtacgcgcccgccttcaggttctccagcacggtcaggttggcgaacacccgccgaccctcgggggactgggcgatgcccgcctccagaatcttgttgatgggcttgcccagcagttcctgcccgtcataggtgatggagccgctgtccgcctttacaaggccggagatggtccgcagcgtggtggacttaccggcgccgttggcgccgatcagggtgacgatcttgccgtcgggtacctcaaggctgatgccgcgcagcgccttgatgccgccgtaagacacacacaaattttcaatcttcagcatcttctgccacccccaagtatgcgtcgatgacgcgctcgttgttctgtatctcctccggtgtgcccttggcgatcagcttgccgaaatccaacacgtaaatccggtcggcaatgcccatgaccaggtccatgtggtgctcgatcagcaggatcgtcttgtggaagtgatcccggatctccttgatgaactccgccagctccagcgtctcctgcgggttcatgccggcggccggctcatccaacagcagcagggtcgggtcggtggccaacgcgcgggcgatctccagccggcgctgcttgccgtagggcagactggtggccagctcgttctgcacatcctccaggcccaccaccttcagcagttccagcacctcggcgcgctgctgcatctcctccttggcgttcaggtggaacgccgcggtaaacagattgctggtgcgccgcatatgcttggcgataagcacattgtcaaacaccgtctgggtcttccacagacggatattctggaaggtacgggccatacccagcgccgtgatcttatccggcgtaggggccagcacatggtcagtaaatgcgtagctgtccaacgccttctggccctttttccaggccttcagcgcctcgtcgtccagcgcctcctccggggcgaactgggcggtgtacatatccgcgtgctcacccttatactgcttcttcatctttccggagggatggttccgcacgatgcagttccccttgaaggaaacgcggccgttgctgggcgcatacacaccggtgatgacattgaacgctgtggtcttgccagcgccgttggggccaatcaacgccacgatctcgccctcgttgacctccagattcagattgtccacggctaccacgccgccaaactgcatagtgacattttcaacagatagaacgctcttgctcatttagacgccacctccttcgccgctttatccttctttttgaacagctttccgaagaagttgatgatggcatcccacgagaactccctgtcgcccatgatgcccttgcggaagaacagcaccacgatcataatgatcaccgagaacaccagcatacggaagccgccgcgcatgaatgggatgttcacacccagatagggcatggggtcatccaggaaacgcagccaccattcggagcaggcgatgtacaggaaagagcccagaatggagccggtcacggagccaataccgccaatgaccacaatcagcagtatctcataggtcatggtggaggtgaaggcgttggcctggatactggcctggaacatggccagcagcgcgccgctgataccggcaaagaaggagctgatcaggaacgcctgcatcttatgcttggccagattgatacccatagcttctgccgccacctcatcatcgcgaatcgccttgaaggcacgaccgtaggtagagttgatgatcagcacgataatagcgatgcagatgccggaaacaatgaacgggaacagcacgctgtcgaagttggcgaactgccgcagcaggttagaggagttggtcagcgggcccaccttgttccactgaatgatagcgcgcatgatctcagcgaagcccagcgtggcaatggccagataatcggacttcagcttcagcactggcaggccgataagccacgcaaacagcgtcggcaccacgccggccaggatcagacccaccaccatgggcaggcagaactgcacgataccaccgtcaaaatattgatacacggcagcgcgggaagccacgggaatagtcaggattgcataagtatacgcaccgatcatcataaagcccgcctgtcccaaagagaacagacccgtaaagccgttcagcaagttcaacgacactgccaccagggagtagatcgcgccctttttcagcacggtcgccaacatggaatagtgctggaacttgtccacatacagcaggaaagcaaggcagacggcggcgaggatcagagacagcaacagatttcttttcttattgttcttcatatctcacaccttctccgtcagtttttcgccgaacaagccgttgggcttgcacagcaggatcacgatcaacagtgcaaacgtaaaggcattgctgaacacggccatatcggcgttggacttgataagcgactcgcagataccgatgataaacgcaccgatcaccgcaccggggatcgagccgataccgccgaacaccgccgctacaaaggctttcaggccaggcatagcgccgatcatggggctgacctgaccatagttggagaagtacagaatagaggctacgcccgccagcagcgaaccgataacaaaggtcacggaaataacgctgttgatcttgatgcccatgagctgcgccgtctcaaagtcgcgggataccgcacgcatggccatgccgatcttagtcttctggataagaatgaccagcaccaccaccagcaagatagtcaaaatgggggtgataatggtgatacgcttgacattcagactgcccacctgcatcacctgagtcaggaacgggatgtcgggatacgcacgggcgataccgccggtgatataggtggccagattctgcagcagatagctgacgccaatggccgatatcatcactgacatgcggggcgcggtacgcagggggctgtatgccgccttttcgatcagaacacccaacgccactgtggcaataagtaccaggggaatacacactgccatcggcatccaggtggcggcatataccataaagaagcccgccatcataaagatgtcaccgtgtgcgaagttgatcagacgcagtatgccatacaccatcgtatagccgatagcgatcagcgcatacaggctgcccaccgttacgccggagagcagcaagtcgatataatacgctgcgtcatgcataagtaaagcatcctccttatatgaatcttgcgctttcggagaccgggggcgatgccatcggcatccaaaaacgcaagagtcatgaaagttgcattgtgaggggagcgcacgctccccccacaatggctgttatcctacaatgaggttcgtctcagactcgacgtatgccgtcttttactccaaaccgttgaaggtgctgaagtacacaatctcaccgttctcgatggtcttgataaccgcgtagttcttgatagcgtcgccgttctcgtcgaacttcaggtcaccggtgatgaggccggagatctccagagttgccagcgcatcgcggatggtggcgccgtcagtggactgggccgcctcgatcgcgcccacagctgccatgtaagcgtcatagccgcagggggtcacgctggagataacgtcggacacaccgccgttgttctccacgcgggtcgcatcctcagccacccacttggtgaaaccgtccacgaaagccttaccggcctcattggtggtatcggcggcatcgaagaaagcggagaagtaaatatcggtagccttgctgccggtacgctgggcgatggagatgtcatcccaggtgtcgccagccatgatggggcaggtgatgccggcatcgcgggcctgagagataatcatagccgcggtctcgatggaaacaggagcaaagatgccgtcgtaaccctcggacttgatggaagccatgatagtggagaagtcagcctcgcccttctggaactccagagtggtagccttgccgcccagacgctccatctcctgacggaagtagttgccgaaaccagcggagtagtcatcgccggactcgatgatcagggcacagttgctgctacccttctcattgaacgcaaagttggccatcacagcgccctggaacggatcaatgtagccgacacggaagtagtagtcattgcccgcagtcacctgggggttggtgcaggaagtgccgatggcagggatcttagcgctctcgaacagagggccggcagcaatcgcgcaagcagaaccatatgtaccgatcaccacagacacaccctgggaaatcagggtctgcgcggcagtgggtgccttagcctggtcggaagcattgtccgcatagaccaactgcacactgtactcctcgccgttgatggtaacggtgggcttcagggagtgggcatactcaacacccaggatctccttcttgccgccgccgccgttctgaccggaagtgggctcaaacacgccgatcttaacgaccttgtcgccgctggcatcactgctgccatcgtccgtcttgccgccgcaggcaaccagagacagagccatgaccagcgccagcatcattgctaaaaactttttcatggtagttcctcctaaatttcccttgggacggccaggctcttgccgaccgcccacagaatatgtgtattttaacggaaaaatgcggcaaagacaattgtaacaacctctaaaaataccggctttctcgttctcccgtggacagcgcacacaggtctgctacgcgtttttgtcctctctcggcggacaaacgacttttgcggcatactgttccattttgcgcgcggcgtgtcggttttggatttatgactttttggcaggagaccggtttcatttttgtgtaaaacgcgcctgttttatgtattttttgtacacatccgtttgaaatccacctgatttttcccggtaacgttttctggaaatttccggcgaggcgaacacgggaattgtcccccggtggcggacgcatttcttcgttattatgcacaaaagacgggcgccacagcgcccgccttttccggttttccataagtaaagcgctgttttgcacaagtgagcccggattttccacttgatttttcgaacatttgcttcacttttctgtatgtttattgtactctttgtgttcacttttgtgcgtacagatgcgctattcatgatcggtaaagtagcttttgaatacctcgccgtccatggtctcatgctccagcaggtactccgccaccgccgtcagctccgtcttgtaccgtgccaatatctcacggcatttttcgtaggcctcgtcgatgatggcgcggatctccgcgtccatctccgccgccgtcttttcggagtaggggcgggtgtgggccatggacttgccgatgaacacctcgtcggtgccggcgtcaaaggccacgttgcccagcctggacgacataccgtaggtgcccaccatcttgcgggcgatggccgtggcccgctggatgtcgctggaagcaccggtggagatatcacccagcatcatctcctcggcggcgcggccgcccagcaggccggccactctgtccagcatatagcggcgggacaggtaggaacggtcctcctccggcaggtagatggtcatgccgccggcctgaccgcgggggacgatggtgatctggtgtacggggtccaggtccggcagggcctgcatgaccacggcgtgaccggcctcgtgataggcagtgagccggcgctcggcctcgggcaccacgcggctgtgcttctccgggccggcgatgaccttgatgacagactggtggatggcctcctcggtgatgaagcgctggccgcggcggccggtcagcagcgccgcctcgttcagcaggttctccagatccgcaccggtaaagccggaggtggcgcgggccacggagcccaggtccacatcctccgccaggggcttgcccttggcgtgtatcttcagtatctcctcgcggcccttgatatccggcaggcccacgaacacctggcggtcgaaccggccggggcgcagcagcgccgggtccagaatgtccacgcggttggtagccgccaggaccaccacgccctcgttggcggcgaagccgtccatttccaccagcagctggttcagggtctgctcgcgttcgtcatggccgccgcccaggccgctgccgcgctggcggcccacggcgtcgatctcatcgatgaagacgatggccggagcctgcttcttggcctgctcgaacaggtcacggacgcggctggcacccacgcccacatacatctccacaaaatcggagccggaaatggagaggaaggcggtatccgcctcgccggccacggccttggccagcagcgtcttgccggtgcccggagggcccaccagcagcacgcccttgggaatgtgcgcgcccagctcggtatagcgctggggatcgcgcaggaactggacgatctcctccagctcctccttctcctcatcggcaccggccacgtccttgaacgtgaccttcttgccgtcagaggggatatcctggatacgggcctcgccgaagcgggccattttatcgttgacggcgccgccgcccatgccgcccatacgggcgatcaggttcatcagcaggatgaaagccatggccgccagcacatagggcagcagggtacgcagccagctgttctcgctgccggcggcgtagtcatagctggtgatgacgcccttttccgcctgggacaccaccagatcgttcatgtcgttataaaacgtgtcgaagctgtggagggcgcagctgacgctggagccgtcctgcagcttcgccaccaggcgcgtgtcggtggcggtgaaggacttgaccttctccgccgtgaaataggcgcgcatatcgctgtagctcacgtcgccggaacggccgaggttgcccaccacctgggtaatgagcaccaccgccagcacgatgaacagcagcatgacgccgctgaaacgttttctttccatgtctccccgtctcccttctcagccgatccagcggacgccctgccagctttggtcactgcccacggagatggccaccagcatccgcgcctgggcggcctccaccggaatatagggctcgcccagcaggcggctgtcattagagccggtgcggttgtcgcccatgacgaacatacagccctccggcacggtgaaggtcttgtcggccatgctgtccggcagggtggtgatgccctgggtgggcaaatagctctcgtccagcttctcgccgttgacgtaggtatagccgttcttgaaggagagcgtctcgccgggcaggccgacgacgcgcttcaccaggaccttgttcagctcctcgtcccagaaggtgacgatgtcgccgcgctccggcaccggatcggacaccacatagggcagccgccagcccaccagcaggcacttggtggggatggtggtctccatggagccgctgggcacataggccagctgcagcagcaccttgaacagcacgaataccgccgccagcgtcaccagcaggtagccgtagtcgtcccacagtctgcggccgcggcttttggcgggcttggccgcaggggccgccgtctccgccggggcgggtgcggcgctctccgcgggggcgggctgctccgcgggggtctttacctcgtcggccgcgggggccggaggtgtggttttcaccggctcgccagtgggggccaggcgctttccgcctttgttttccatatacttcacttcctattctcaaatgctaagagggatgttccgcgccctcccggcgcgtgctcttcttccgcctgcggcgcggggagaaaccggatttttcgccaagacgaggcgcggcgacgacggcgtaccgtgtgtacgtcgaggagccgtaacgaagtattggcggaaaagacacctctccccccctaaaaccgccggatctttcgttctgccgatgacggggcggtgccgctgtactttgtgtacagcaagccgacccggcgatggcagaacggaagagacgcggttttacttgctgtagacctcgggcttgaggacgccgatatagggcatattccggtactgctggcagtagtccaggccgtagcccaccacgaactcgtcggggacctcgaagccggcatagtcggcggtgatgggcttttcgcggcgggcgggcttatccagcagggtggcgatggtaacggaggcggcgcccttggtcttcaggtactccgtcaggaaatacagggtattgccggagtccagaatatcctcgacgatgatgatgtcgcggccgctgatgtcgcgctggaggtcgcgggtgatctgcaccacgccggaggacttggtggcgttcttataggacgagaggccgatgaactccacctcgcttttcagctgggcggcgcggaccaggtctgccataaaaatgaagcagccgttgaggacgcccacaaacatggggttcttatccttaaatctgtcgtacagccggtcacccagctcctggacgcgggccttgatctctccttcagacagcaggaccttcaggatatcctgatccatattactctttgccattgcttgttatcctccgttgttttttgtgatggtgatgtatatggtgttgccggaacactccggcagggctttctggtcaatgcccacacgccagacggcggcgggacggcccgccagacagaggacgggccaggtatcgcgctccggcggggcgatgccgcgctcggcgaacaggcgcttgaggctgcggctgccgcggctgtcgggcagggtcaggcggtcgtcgcggcgccagggtcgaacggtccaggggccggaccgcagtgccagagcgtcgggggcgggcgcgtcggagagggtgatgcgccaggggccggcgaggttatcgccggggcggagcgccgcctcgtccagtggggcgggcgcgtcggagagggtcagggcgccgtcacggcagacggcggacgcgccgccgggcagggaaagcgcgccgccggtgcggcagaggtcctccagcgcccggtagtgggcggcggtgaagtcctttttgcccgcgccgaggcggtccgtcagcaggcgaagcatacgggggcgcagagcctccggcgcggagaggagcgcggcgcagggaagcgtcgtgccctccggcggcaggagggcggcggcctgggcgtccaggaggtcgttctcggcgcgcaggatgtccgccgtgcgggcgatgtgcgccgcggcggcggggttgatcgcccgcagctggggcatgatgtccagccggaggcggttgcgggcgtagtgggtgtccaggttcgtctcgtcagtgacgtagggaaggccatgcgccgcgatgtagtcgtcgatggcggcacggggcgtatccagcagggggcggatgatgccgtcacggaccgggggaatgccggtaaggccctggggaccggtgccgcgaagcaattgcagcaggaccgtttcggcctggtcgtcgcggtggtgggcggtggcgataaagtccgcgccgagggcgtccgccgtgcggcggaggaagtcgtagcgggcgcggcggcccgtctcctccaccgtcaggcgccagacggcgcagagggcgtagacgtccaccgtttcggtgtagaaggggatgttccgttcggcgcagagagcgcggaccaggtcctcgtcacgccgggccgtggggcgcataccgtggttcaggtgggcggcagccacgcggaaatcgcgggcccgacccagcttccacaggcagtccagcaggcaaacggagtcgcggccgccggacacggcgcagaggatcagccctccgggaggtgggaacatctgccagcgcgtcatccacgcggtcaggtccaggggctcactcatcctcgtcatagcgggtctccagcgtgccgaaggcggtgtactcgggcatccagcggagctctaccttgccggtctcgccgtggcggttcttggctacgatgcactcagccacgttgcgcttctcggcatcgctgttatagtagtcgtcccggtagaggaacatgacgatgtcggcgtcctgctcgatggcaccggattcgcgcaggtcggacagcatagggcgcttatcctcgcgcttttcattggcacggctcagctggctcaggcacagcacgggcacctgcagctccttggccatgatcttcagcatacggctgatatcggacaccgcctgctggcggttctcgccggaatagcccttaccgccggcggaggtcatcagttgaagatagtcgatgaccaccaggcccagattttccaggcggcggcacttggcgttcatatccgccacggtcagcagcgggttatcatcgatacggatgtccatgcggctgagggcggaggcggcctcggcgatgcgctgccagtcgctctcccgcaggttgccggtgatcaggcgctgattctccaccaggccctcgctggcgatgaggcgggtgaccagctgctccttggacatttccagggagaagatggccacggtcttgccggactcgcgggcggcggacagggccacattcagggccatactggtcttgcccataccgggacgggcggccagcaagagcaggtcggacttgttcatgccgttgatcttggcatccacagcggagagtcctgtggacaggcccggcacggtccggcctccgttagcggacagctcggccagctggctcatcacgtcgcccagcaccatgcccaccgtcaccatgccctgggcgctgcggccacggcggatggcgtagatctgctgctcggcggcttccagcatatcgccggcggcgccgccgccctcctgcaccatggcggtgatgctgccggcggcctgagccacctggcgcatgagcgacttgtcctgcacgatgcggacgtactccatgacgttagcgctggtgggagtgacctccatcagctgcagcagataggaacgggtattgtcgttatacagtccgttcttctccagctcgccggccacggtgacgccgtcgatgggctgggagtagacgaacatatggtagatcgtctcgaagatctcccggttggtccgcagatagaaatcctgggcctgcagcttgtccatcacgtccttgacgcagtcggcgtcgatgagcatggagcccagcaccgcctgctccgcctgaggggaatggggcatggacggcgtcagcagggcgtcggtgttgttggccatgggaagacctcctttcaaaattacggtaatagccgcgcctgcggcgcggtgctttccccgcttatttctcttcgatgacgtggacgtacacggtgccggagacctcgtagcccagcctggccttgacctcatagctgccgaagctcttgatgggctggtccagcaccagcttcttgccgtcgatggtcaggccgtgctgggcctgaagggcatcggcgatggcggcgccggtgatggcgccaaacagcttgccgccctcgccgcccttggcggcgatcttcacctggcaggccttcagcttttcggcgatggccagtgcctcggccttggcctcggcgtcggctttggccttggccttggcctgaagattcatagtgttgacggcgtcggcagtggcctccacagccatgcccttggggatcagaaagttgcgggcatagccctcggcggcctcgatcatctggcccttcttgcccttgcctttgacgtcctgcttgagaatgactttcatatctgtatctcctttaccttaattttcaaaatacttgtcgatggcctccagcagctttgccttggcctcggccacggtgatgttgtccgcctggccgccggcggtggtggagttgccgccgccgcccaaggcctccaggatcacctggacgttgacctcgcccaaagaacgggcagacatatacacgccgtcaccttttttatacagcacaaagctggcacggatgcccttgagggtcagcagctcatcggccgccttggcggcggtgacgcggtcgcactcctcatccagggccaccacggcgatatcgtcgcggtacagctctgcctgacggataatgtcatagcgggcgatcatggagttcaggtccccctggaacatccgctggacatcctgggtgtcggcccccagacggcggaggtaggccgccgcctcgaaggtacggccgccggtgcggttggtaaaattcttggtatccagcacgatgccggagagcagggcctcggcctcgcatttcagcacgtcagacggctccaccagatactgcatcagctccgccaccaactcgctggcggaggaggcgtagggctcatggtagttcagggccatcttctcaatgtagctgctgccgcggcggtggtggtcgatgacggccacacggttgcacgtctccagcatctcctcggactccacgctctcggggcgattggtgtctaccaccaccagcagggcaccgggttggcacttgataaaggcatcttggccggagatggcggtattggcgtattccggctgctcggagagacgccgcaggatggggtgagcggcgttgttctcggtgtcgatgatgatctggcagggcttgccgcgcttgcgggcgatgcagcagatgcccacggcggcgcccaaggagtccatatccgcgtatttgtgacccatgacgtacacctgcttggcatcgtcgatcagttcacccagagcgttggccatgacacgggacttgaccttggtacgcttttcggtggacttgctgcggccgccgtagaactcgaagttcacacggtccttgaccacggcctgatcgccgccgcgggagagggccatctccaacgccagggaggcgttcttgaacagctgctcgaagctgtcctcgtcccggcccacgccgatggacagcgtggcggacacaccctcgccggcctggacctggcggaccttttccagcacgtcgaacttgctttcggtgtagccggtgtagtccttctcctcgaagaggtagaggtaacggtcgcggtcgtagcccagcagcagcccgccggagccggcggcccagttattcagctgttcctccagcgcggccagcagcgccgagcgcttattctcggggcaggccttcatcagctcctcatagttatccaccatgaggatggccataaggggcttggtcagctccagggtctggcgcatctgctcagcctcagtgatgtccatccagtaggtggtggccagggtgggctggtcgccgccctccggctccgggcggctcagggcgccgaagacgcggtagatacggtcgttccagcggaactgctcgggatattcacgcttgccgtccagcagccagcggtaggtgaagtcggggatcacggcatctaccgccgtttcaaagatcttatccttcaggccggtcaggtccgtgaacatatcgttgcaccacaggatctcgccggtggctacatcgaacaccagcatgggcagcggcgcgtagagcatattgctggaccgggcggtgtccataccgccggagacacggtccatgtactggcggacagaggcctgggccatcttgttgcggcggcggcccaccaggatgaccagaagggccaccagaccctccgccgccgccagcagcggctggaagggcaccgtcaccgccacaaaggcgatgaggcacaggctgtacagcgtcatattggtacgaaatccgcgtatgatcttcttgctcaagggaacgcgcctccttcccgccggggatactactccatactgagagtagtttattatagcacgaaagccgggcggggacaatacgcttttcgggaaatcagcggggaattttcccggcggggcggcgggtgtcaaataccatcaaatgccgtcggcaagttgggggtgtacaaatgggaaaaactgtggtatactttgtgaaaagtgctgaatacggcacgtattttttggttgtttcgcggtgcgtggatgccgcggtcaatatagcaaacgagggcgttcccctctatatcgagtgctgacgacgggcgacagactgttccctccccctgcgatgcagggcaggcgggcggggcagaacgcctttgtttccgtgcggtcatttttacccgccgcgacgcgctctatcttatctgaaaaggagcatttattcttttatggcagaaaaattcaagatcattccccttggcggtctgaatgagatcggcaagaacatgaccgtctatgagtacggcggcgacatcatcgtggtggactgtggcatggccttccccggcgacgatatgtacggcatcgactgcgtcattcccgacgtcagctatctggtgaaaaaccgcagccggctgcggggtctgttcatcacccacgggcatgaggatcacatcggggccatcccttatgtgctcaagcagatcaatatgcccatctactgcacgcggttcaccgcggggctgatcaagctgaagctgcaggagcatgggctggccagctctacgaagctgatcaccgtggagccgggtcagacggtgcgggcaggcaagttccaggtggagttcatccacgtgaaccactccatcgccgactcggtggccttcgccatccacacgcggatgggcgcagtcgtacacaccggcgacttcaagatcgactccacgcccatcgacggggaggtcatcgacctggcgcgcttcggtgagctgggcaagcagggcgtgctggcgctgctggcggactccaccaatgtggagcgcccgggctataccatgagtgagcgcgccgtgggcgccacgttcaagcggcagttcaccgggtgcgacaagcggatcatcgtgaccaccttcgccagcaacgtgcaccgcatccagcaggtgctggacgctgcggcggcctgcggacggaaggtggccgttaccggccggagcatggagaacatcatgaaggtctccacggagctggggtacatgaaggtgcccaaaaacacgctgatggacatcaaccgcatcaagggactgcccctgaaccagcaggtcatcgtgaccaccggctcccagggtgaggaaatgagcgccctgtaccgcatggcgttctccacccacaagcaggtggacatcggccccggcgacaaggtcatcatctccgccagcgccatacccggcaacgaagtgacggtgggacgggtcatcaatgagctgttccgcaagggcgcggacgtggtgtatgacaaggcggatatgctgcacgtgtccggccacgcctgccaggaggaactgaagatcatccacgcgctgacgaagcccaggttctttatccccctgcatggcgagcagcggatgctgcagatccacaagcgtgtggcggagagcatgggaatggcccccaccagcatcgtggtggccgacaacggcagcgtcatcgaactgaccaccaagcacatcaagtgcgagaccaccgtgcccgccggcgaggtgttcgtggacggcggcggcgtgggcgaagtgggcgcggtggtgctgaacgaccggaagctgctggcggaggacggcatggtggtcatcgtgctgcccatgtccagccacgaccaccagctgctgtgcccgccggagatcgtcacccgaggcttcgtgtacgtgaaggagtccgaggagctgctggaggatatgcgccgggtggccacggaggcggtggatggaatgtccgccaagaagcgccgggacgagggcgacgtatgccgcactgtgcgctccgccgtgagcagctatctctataagcacaccaagcgcagccccatgatcatccccatggtgacaaagctgtaagaaaacaagggccgcccaaaagggcggcccttgttttgtattcctctatgaacaaatcctggttattccgaattcgggataatcaggattatgccgagaaaatagttattccgaagtcattgcatagagtcttgtaaaacaaggattctccgcaaaaacttcggaataacaaagcgggcctcattttatataatgtggacatgcagacaaccgtctgacaccacaaaatataaggagggcctatgaaactgattgaattagacgcaactgcacagcgtgccctggagttgttaaccaatgcggggatgagtgatggaagcatatacgactatactcatacgggttttggcagcatacttcgacattttcacacaaaaggcatactatatgctacagcagaaatgctcgataattttttgctggagcaacgcgcgcttttggaccaaggagatatctcacaatggaaatggggacttgttcgcaggagttgtgagcttctgaaacaatgttcagcgacggattctattgatttgcctgaccttcagccatgggaccctgtatggaatcgtccaaagcaaatcatccaacacgacgcaccgacggcgaaacagtttgccgaatcggaaaatatttatgtgcttgtctggatggtcaacaagcgtatggaacaacttggcctttcggaaagtacggttcgccattacacggaagagggattagccgtcattttgaaaaagcactatgattctggtacagaaagttactcagacaaacttatatcccagcttacagaggagcgaagactgcaatatgagcaaggggaggttggcagaactgcttatcagaatttgcgcaaagcggcggcgatgctccaggagttccgcctgacagggaaaatcacgctggaaaggattcctaattggggacggcgcgaagttattcctcagcacaaagcgattctggataaattcagtgcgcatgtcacaacgcagagcaactgggctgaaagttccgttagcacagttacaagtgtggctcgtgtatttttgcttgaattagaggaccatggaatagtctccattgaaactgtcgcaatgatggatattgccacatgcgttacaagaatgcttggacgatacactggtggaatgagatctgctctttttggcattcggacctttctacaatttttatatgaggccgagatcactgcggataatttttgcaaaacactcccggaatttgtttgccctcggaagaactttcgtgaaggattttccgatgatgaattggaacgtctactttctcagccagatatcacatctgcggtcgggaaaagagactacgctatgatggttttggcagtgcaaagcggcttgcggtcttgcgacatcatacggctcacatttgactgcatcaattggagaacgagggaaattcgtgttgttcagcacaaaacaggacaaccaatcgtaattcctcttgaaccggaaacaggcaacgctatagcagattacttgttaaacgggcgccccaagagttcactaccgcaaattttcctctgtcacgtcggcgctgtccgtgctttgaaaagtcgaaccggaagtgcaattgtctccaaatacatgaagggcgcaggaattcattccgggtatcgcggatttcacagtttccggcgcaccttcgctacaaatctgctccagaacgaagtgccaattgagttgatccaacagatgctgggccaaactcatattgattcagcaaagccgtacctgtccattgacgaacagggactgaagcgatgtgcattgcccctgctctctcatggaaaggaggtagggaactaaaatgatgtacacctttaagagttgttttgcatctcagatcgaggatttcattgctcagaaaaacgctctggggtttggttatctggagtcctcccgtctcctgcgagactttgaccgcttttgcctgacgcatttcccggaagaaaatacactgaccaaggagctttgcttagcttgggccacgaaaaaggataccgaaggcaacaataccttccgcaaccgtatgatgccggtgcgtgagtttgccagatacttaaaccgcaacggcgaagctgcttacattctgccgccagatattgcccgaaaagatgcgccgtatgcgccgtacatctacaccgaggcagaaattcaggctatttggaatgttcttgacgccttaaaaccgcgtaggggctttcctgtacggcattttgtgattcctgccatggtgaaactgctgtattgctgcggcttgcgtccggcagaggtcaggcggttgcgcgttagagacgtagatctggacaaagggcggctgaatattatggagagcaagcagcacagaagccgtatagtcatgatggcagatgatgtggtggaaatgctctcgaattgtaatgctgttgtctccgctgttatgtcgggtcgtgagcccttctttcccaacactgagggcggctattatgggaaacgcggattggaaaagatctttcgtcagactttgaggaaagccgatattgacagaactgggcgtcgttccccacgcctttatgattttcgccacacttttgccacccacaggctgtaccactggatgaacgagggcaaagatctgaacgttatgattccctatctgagtgcgtacatgggccatgcgcaactctcggacacctattactacattcatttagttcctggcttgttggaggaaatgtccgggttcacgttttcttctgccgaggcattcttgccggaggtaggaaacgatgagtgatttctttgatgcaatccggcgttttctgctggactatctgcccaagcagcgctgccttagtaaaaatacgattctctcctacagacagacactcaatattttcgtggcttatatgagggatgagatagggattggagctgctgagctgaccttctctcgtgttgaccgggacgtcattcttaacttcctaacctggctggaaaaggcgcggggatgtagtgtctctacccgcaaccagcgtttaatggcattgcggtctttcctggacttcgctggacaaatcgattgtacgcagacgtcattgtatctttctgcctgcaatattccctccaaggaggctcacgggcgaatcgttgaattcctgaccgaaccggcgttgaccgcgctgcttcaacagcccaatccttccaggcagaaagaccagcggaatcttgtattcatgatcctcatgtatgataccgctgcccgatgcagtgagcttctcgatatgaaggtctgtgacctgcgtcttgacgcaaaacatccaattgcgtacttgcatggtaagggacgaaaaacccgtacagtgccgttgctgaacagaacagtccaacactgcaaacagtatctgaacaaattccatcccaacaaggatgactacagtgaggcaccgttgttctataccgtgatccatgggaggcagcaaaagatgtctcctgatacggtagcagcattctttgcgaagtatgggagcatggcaaaggcggtttgtcaggaagttcctgaacatatccatccgcacatgatgcggcacacacgggcgatgcacttataccaatccgggatgcccatggtacttctttcccaatatcttggccatgcacaggttgagacaacaatgatctatgcttatgcggataccgagatgaaacgtgccgcaattcagaaagctgatgctgtccgcggaaccaagcccgtaccggatgagatttgggctgataacgaggaaatgattttgaagttatctggtctgctctaatcctattgttctatatatgccgattatgttattccgaagtttttgctggtaacgccttgtactacagggtttgcagcgattacttcggaataactattttctcggcataatccccgcacggggagctctcatagcgctggatctaacgcgctgcgcgcaggtcgaggcagcgagttcaagcctgcccgcggcattccaaaaagaaaacaccatcctgacggatggtgtttctttttgtgattgcccacaggctttgttgtctgcactcccgcataccgcaaaagtaaaaaacgtaacgaggctcgactcgctaccggcatcccacgaatggcagagccattcgcaggagccctgccggacctcttgatttaacgcgctgcgcgcaggtcgaggcagcaagttcaagcctgcccgcgacattccaaaaagaaaacaccatcctgacgggtggtgtttctttttggagcgggcgacgaggctcgaactcgctacctcgaccttggcaaggtcgcgctctaccagatgagctacgcccgcaaacgcaaggtagattgtagcagaaaacacgctgcttgtcaaccctgcatttttattttttgtaaaaacgctgccgtcgcggcacgggctaccgcatgaggatctccaccacgccggcattggcggcgttgggatagaaattcgtcatccagccgctgccgcccatggcgctctgcacctggtacaccgtctgctgcacctgataggactgtccttcaaaggcgctcagctgcaccaccagctccgttttgcccgcctgggccgcctcggtcagcagatcgtgcagagcagagacattggtggcatggacgatgtcgatgagctgctgctcggtcttcttatagccgatggtcacggtgatctcgctgtaattccgggcggaatcgtccacggtgtactggatataggacaccgcataggagcccatgggcgtgtccttctccacctcgcggcaggccttctccgccgcgtcgccggcatccagcccctcctgggcgtaatagagccagatggtcccctcctccgcgtggttgcccacgaagatgaggatattgttcaccagatcctgatacgtgtccgcccgcagcacgtcccgtccctcgccctcgtaataggtaggactgtggtccttgacctcgtaccactcccgattcagcaggctgccgcagccggtcagcgacaccgtcagcagcgcgcacagcagcgccgcgcaccatctctttaccatgtccgtgccctcctttccgtctcgttacagcagctccagctgcttctcctcgctgtcctccggcttcaggagcgcacccgccgcggggatggtccgcgtccggtagcgggcaccgttgacgatgccgcattccaccgcgggaagcaccttttccagccggtacttgggcttgatgttcatcacctgcacgccctgggtagaacgggtggtcttgggcgagagcagcgccgtgtgcaccagcagagcccggggctcgttggtctccagcgccagctccgtatcctccgtcaggtgtacggcgcacaccaacgggaacttgtcgcagtaggcgccagtgagcttccgccgattggacaccgtggcgtaggcgctcagcgccacacgggcggcacggccgttctcaaagaaaaacaccacgctgccgctgtaatctcccggcaggcacagccagatcacattctcgccggcgtccatgcccagcttggcgggcaggtagtcgcccagggcggaggccttcgtctcgccgaactcactggcacggctcttgtacacctggcacttatccgtgaacagcagcagctccgtgctgttggcggcctcgaagtactgccgcaggctgtcgccctccttgtacttctgctcgccggacatccgcagggactggggcgtgatcttcttgaaatagccctcccggctcaggaacaggtggacggggtagtcctccaccggctcctcgtccggctcctccggcatctcgtgactgtatacgatctccgtccgccggggcatggcgtacttcttcttcacgtcctccagctcgttgatgatgatcttgcggatgcggcccggcttggccagagtatcctccaggtcctcgatctcgtcctgcagggcgctggtctccgccacccgcttgagaatgtactccttgttgatgttccgcagcttgatctccgccacgtactccgcctgcacctgatcgatgccgaagccgatcatcaggttggggatgacctcggcttcctcctccgtctcacggatgatccggatggcccggtcgatatccagcaggatgcgcttcaggccctgcaaaaggtgaagcttttcctttttcttattcaggataaagtacacccgccgcttgacgcagtcggtgcgccaggcggtccactcctccaggattccgcccacgcccagcacgcggggcataccggcgatgaggatgttgaagttgcagctgacggtatcctgcagaggcgtcagccggtacagcttggccataagcttgtccgggtccacgccccgcttcaggtcgatggccagcttcaggccgctgaggtccgtctcgtcgcgcatatcgacgatctccttgaccttgccggctttcaccagctccgccaccttgtccagaatggcctcgatggtggtggagtaggggatctcgtacacctcgacgacgttttccttcttatcgtaccgccatcgggcgcggaccttcaggccgccgcggccggtgctgtaaatggcccgcagatcgtcgccgtcacagatgatctggccgccggtgggaaaatccggtgccagcagcgtggaggtgatgtcgtgggcggggtttttcagataggcgatggtggtatcgcacacctcacccagattaaagccgcagatctggctggccatgcccacggcgatgccctggttggcggacaccagcacattgggataggtggtgggcagcagcgccggctccttggtggtgttgtcgtagttgtccacaaagtccacggcatcgcagtccagatcacggaacagctcggcgcagatgggggccagcttggcctcggtgtaccggctggcggcataggccatgtcccgggagtacaccttgccgaagttgcccttgctgtccacaaaggggtgcagcagggactcgttgcccttggccaggcggaccatggtctcgtagatggcctggtcgccgtgggggttcaggcgcatggtctggcccacgatattggcgctcttggtgcggctgccggtcaacaggcccatcttgtacatggtgtacagcagctttcggtgggagggcttgaagccgtcgatctccgggatggcgcggctgacgatgaccgacatggcgtagggcatatagttctcgtccagcgtggcggtgatgggctgttccaccacagcgccccgcaggcccatcacgttgggatcgcccgcgtgccgtatttctttttcctcggttttcttttttgccataggaacggtgtcctttcactgtctaaagcctgctgccgcaggccttttctttatagctttgcacggagcagatgtccggagcaccggcaaaggcgtcagatcttccgccaagacaaggcgcaggggcgcagccatactttgtgtatggcaagccgctgcaacaaagtattggcgcaagagatacgcctttgtcagcttacatcgatcatatcaaggtacttatagccattttcagcgatatagtcctttctgccggacaggttatcgcccagcagcaggtcaaatacccgggccgtctcctcggcgtcctccggcagcacccggatgagccgccgcgtctccggcgacatggtggtcatccacatcatctccgggtcgttctcgcccagtcctttggagcgctggacattgaccttcttgccttccagctttttcaggatatccgccttctccttctcagagtaggcaaaccaggtcttttcgccggacttctctttgcaggtgatctcgaacaggggcgtctcggcgatatagacgtagccctcccggatcagggtggggcacagccggtagagcatggtcaggatcagcgtgcggatctggaagccgtccacgtcgccatcggtgcagatgaccaccttgctccagcggaggttgctcaggtcaaactggttcaggtccttgacggccttgccgctgacctccacgccgcagcccagcaccttcatcaggtcggtgatgacgtcgcttttgaagatacggggatagtccgccttcaggcagttgaggatcttgccgcggacgggcatgagaccctgaaattccgcgtcgcgggactgcttgcaggcgcccagggcggagtcgccctccacgatgtatatctcgcggcgctccacgtccttggtgcggcagtccacgaacttctgcacccggttggcaatgtcgatcttctcggtaagctttttcttctggttgatgcgggtgcgctccgccgtctcgcggctgcgcttgttgatgagcacctgagcggcgatcttctccgccgcgtcacggttctcgatgaagtatatctccagccggctgcgaaggaactccgtcatggcctcctggatgaacttgttggtgatggccttcttggtctggttttcgtagctggtctgggtggaaaagctgctgctgaccaggatcaggcagtcctgcacgtccgggaaggtgatcttggcctcgcccttgacgtacttgttgttgtcccgcaggtatttgtcgatggccgacaccatggccgagcgggtggccttctccgggctgccgccgtgttccaggaagctggagttgtggtagtattcgcacagggcggtcttgttggagaagcacagcgccacgctgagcttcaccttgtactccggcttgtccggccgatcccggccccggcgctccgcctcccagtacaccggctccgtcagggcatccagacccgccagctcccggatgtaatcctcgataccgtgctcgtagacgaactcttctgtctcgaactttccggcggctgtctcgtttttcagccggaaggtcacgccggcgttgaccaccgcctgccgccgcatcacgtcccggtagtagtccacggggatatcgatatcggtaaacacgtccaggtccggcagccagcggatggtggtgcctgtacgctttctattgccggtctgttcgctgacctccagcttgcccgcgatctcgccgcgctcaaagtgcagccggtactccttcccgtcgcgccacacggtcacgtccatatagcgggaggcgtactgggtggcgcaggaacccaggccgttcaagcccagagagaactcgtagttctcgctgttctcgttgtcgtacttgccgccggcgtacagctcacagaacaccagctcccagttgtagcgtccctctttttcgttccagtccaccgggcagccccggccctggtcctccacctggatggaccggtcggcgaaccgggtcacggtgatgagcttgccgtggccgccccgggcctcgtcgatggcgttggacagtatctcgaataccgcgtgctcgcagccctccaacccatcggagccaaagatgacgccgggacgcttccgtacccggtccgcccctttcagactggagatactttcattatcataagtcgctttctttgccatatctatcctccggtgtataccgatcacaattcattatacattatatagtatcggcaggcgttttgcaagcgctcacacgccccattccccgccgcttccgcaagaaatgttaggtcccctgaaatattgactggtttacacaaaaaataacccggccgcaaccgggcgcagccctttgtgtatagggttttgcacagtttccacacctttttccaccagcgttatgttacctgataattctcgtaaaaagttgcaaaaacacagttaatagacataatcaggcggcttttactcttatgcgtgtatacttgcgtgcatattcatttgctgcacacgcttatcggacgacacgctgttgaataaccgtgaaaccacctgtcccccagggcttttcgcccacgcccccgacaaactgcacaacgggacaacggcggcgcggcgcaacttttccgtcacggcgcaaaaaagactcttgcgctctgccggcaggtgtgctatgatgtgaatacagttgttcgcaagcggcggacacgaggaggaacgatatggagaaacagaaattttacttagtcgccgccgacgctctgccggaggtctttctccgggtagccgaggccaaacggatgctgcaggtaggcgaggccgccaccgtgggcgacgctgcccgccaggtgggcatcagccgcagcgccttctataaatacaaggatgccgtacagcccttccagaatatgcacgcggggcatatcatcaccttttatgccctgctgaaggacaaccccggcgtgctgtccaactacctgtccatcttcgccaattccggcgccaacatcctgaccatcaaccagaccatccccaccaacggctgcgccggcgtgaccatctccgcggagacgggcgatatgtccgaggagctggatgatctgatgacccgtgccgccgcggcggagggcgtgctcaaatttgagatcatggcgggataatgctcagacgcaaaaaaagcaggcacactatgtgtgcctgcttttttgcaagaaatatccccccggctgacgccggggggatgcgtattgcagggagttactccgccttgggagcctcagcggcctcggcagcagccttggcagcggcggccttcttctcggcagcggccttctgcgcggccttgaacttctccttctcctcgggcgtggggataggctcaatggcgttgcgcgggcaggccttggcgcacatggtgcagttcttgcacttgctgtagtcgatgacggccacgttgtccacaacgtggatggcgtcgaacttacaggtacgctcacacataccgcaggcgatgcagctgttggcgcagaccttggtaacggcggggcccttgtccttgttggaacagttgacaaacaccttctgcttgtagggcacctccacgatcaggtggtgcgggcaggcagcgcggcaggcaccgcagttggtgcacttctccttgtccaccacggcaacgccgttgatgacatggatggcgtcgaacttacaggccgccacgcaggagccgaagccgaagcagccatagcggcaggccttggcatcgccgccgcagaccttggtggccgccagacagtccttcacaccgcggtactcgaagttatccttggcgttgcagccgccgttgcacagcacgtgcgccaccatcttgtcgccggagggagcctccatgcccatgatggccgcgatcttcgccgcgttctcggggccggcgggggcgcaggcggtgacgggggccttaccggcgaggatcgcctcggcgcagccgccgcagccgggatagccgcagccaccgcagttggcgccggccagacatgcctggatctcaggcaggcgggggtcgacctcgacctcgaagaccttagcggcaacagcgaggatcagaccgaacacaatggcgagtacgcccagaacggcgatcgcatatacaatagtcatatccttctacctccttaccagaccttcaggccgctgaagcccatgaacgccaacgcgatcaggccggcggtgaccagcgcgatggggaagccatcgaaggccttggggttctcgctggagacctccagctgctcgcggatagcggcaaacaggaagatggccagcaggaagcccagaccgccggtgataccgtagaccacggactcaatgaagttgtactcattctgggtgttcagcagagcgacgcccagcacggcgcagttggtggtgatcaggggcaggtagacgcccagcgcggtgtacagggtggggatgttcttcttcaggaacatttccacgaactgcaccagcgcggcgatgaccagaatgtaggccaccgtctgcatgaagcccagatcgaaggcgatgaggatcttgttgacgccgaaacagacggcggaggccagacccatgacgaaggtcacggcggcgcccatgcccacggcggtgtcgatcttcttggacacgcccaggaaggggcagatgcccaggaactgggcgaagatgaagttattggtcagaatagcgccaagagagatggcgagcaaggtagtcacactcatagcttacttggcctcctttttcttttcgctcttggccagagcccactgcatcacagcgatgaggcagcccagcgtcaggaagccgcccacgggcagcgtcaacacgctgacaccgtactcggcggggaagatctcaacgccgggtgcgctgcccagtgcgccgccgcccagcagaccgccgccgaacgtgccggcgccgaagaactcacggaatacgcacatgacgatcagcacgagagtatagccgatgccctggcagatgccgtccaccgcggaggcacccacgccgttcttggaggcgaagccctctgcacggccgaggatgatgcagttcacgacgatcagggggataaacacgcccagagagctggacagggcgggaacgaacgccttgagcagcagatccacgcaggtgacgaagccggcgatgactacgatgtagcaggcgatacgcacttcgttgggaatgatcttgcgcagcagggagataaagatgttggagagggtcaggataatgagcacggacacgcccatgcccaggccgttgaagaacgacgtggtgatggccatggtggagcacatacccagcacctgcaccagcacagggttctgtgtgatgaggccctctttcagttgcttaccgaaattcataaatgcagctcctcctttcttagcccagcagctcggcaacagccagagcggcattggcgcccatgttgatgcccttggtggagacggtagcaccggagacggcgatgatgttcttgcccaccaccagggaacccgcgccgctctcaccgatgaactgatccaggaccggctcgccggcggcgttgggctcgttgcccacgaccttggtgccgatgccggacgtctcggcgtggctgaccacggagatgccggtgatggccttgtcggcgtccacgcccaccatcatcacgatgctgccctgggagccggaggcggagatcttcataacatagccgttgtcggcgccggcggtggtcatgggatacagctccaccagcttgccgccctgagaggcagccgccgcggtcatgtcgtcggtgatgtccagcttgtcgccaaactcgctgccctcgggagccacagcgctcatggcgatgcgggtgttctccgcatcgatggcggcgatcttgtcggcggtcacgttgtcgaccagacccagcagggcggccacaacgagggaaataacagtcaaggtgccggcgaccttgagaataaacttaccggagatcttcattacttcgccgcctccttcttttctttcttgggcgcaccatagatgacgggacggatgtacttatccagcagccaggtggtgcagttcatgatcaggatggaatagcagacgccctcgggataggagccgaagcggcggataaagcaggtcagcagaccgcagccgaggccgaagatcagctggccgggcttagtgacaggggaggtggcatagtcggtagccataaagatggcacccagcatcaggccgccgccgaacacgttgtacagcatatactgcatgttgtcgataccggcgggcgccgcgatcagggtcaggatggccacggtgccgatgtacgccacggggatctgccaggagatgaccttgcggatgagcaggtagacgccgcccaccagcagacacagggcggagacctcacccagggagccgccgaccttgcccaggaacatatcgccgatggagtagttgctcatcagggtggtgaacgcctcctcggtgccctccttcatgatggtcatgggggtggcagcggaggtgacatcgggacggatctggggaatggcccaggtggtcatccaggtggcatagctggccagcaggaacgcacggcccgccagcgcggggttcaggaagttgcagccgatgccgccgtaaagctgcttgaccacaacgatggagaagaacgcgccgatgatgatgacccaccagggcaggtcaacggggcacacgaagctcagcaggataccggtgaccacggcggacaggtcgcccaccatgcaggacttcttcatggccttgcggtaggcccactcaaagaacacgcaggacaccacggagacagcggtcagcagcagagccttccagccgaagcagtacacgctccaggccagtgcgggcagcagcgcgatgatcacgtccagcatgatggaacgggtatcctcgttggagcggatatggggggaggaggacgcgatcagcttgagattcttgtaatcagtcatggtttacgcctccttcttttcggcagcggcctttgcctcggcctccgccttggccttggcggccattctcgcgttgttgacctcctgcttgcccagacggaacgcatgggtcaggggcaggcgggcaggacaggtgtaggtgcaggcgccgcactcgatgcagtccatgccgtgcagcacgttctgccaggtgtccacgtcgcccttcatcaggtacttgtacatgaaaatgggctccagacggatggggcacacgcccacgcacttgccgcagcggatgcactggggatcctcgacgtactgctcctccttgtcggcgaaggccagcatggcgccggtacccttgcccacggtgacgtccacgtcgtactgggccagacccatcatcgggccgcccatgatgagcttgtaggtctcgtccttcaggccgccgcaggcgtcgaacagcttggtaatgggggtgccgatggggcactcgatgttcttgggctcgatgacgccggaaccggagacggtgacgatcttgttgaccacgggcataccctcatacaccgcgcggtagatggcgcaggtggtattcaggttgaagatgcagcagcccgcgtcggcaggcagcttgccggagggcacctgacggccggagacggcctggaccagctgcttctcagcgccctggggatagcgggtgtgcaggacctccaccaccacgggggcgttcagctccgcgatcttggcgttcaggacgtcagccgcgttctgcttgttggcctcgatgccgatgtacaccttatccacgccgaagcacttggccagcagggtcgcgcccttgatgacctgctccggacgctccagacaggtgcggtggtcgccggtgatgtacggctcgcactccgcggcattgatgatcacatagtccaccttgcccagaccggaagagatcttcacatgggtggggaatgtcgcgccgccctggccgacgatgccggcgttcttgacgatctccaccagctgctcgggcgtcaggctgtcgggatccgccacgggcttgacttcctcggagacctcatcctggaaatcgttttcaatgaccacggacatcatcttgccgcccatagagaagggacggggctccacggccttgaccgtgccggagatgctggcgtggatgggggcggaaacaaatccgccgggttcgccgatcctctgtccaattttaaccttgtcgcctaccgctacaataggcttgcaaggcgcaccgatgtgcatagacatgggaatgaccacctcagccggcgccgccagcttttcgatggccttttcattggttgcggccttcatgtcgttgggatgaacgccgccaaagaatgcttgtgccattgtcttcacctcatcttactaccgggtggcgctatgccaccgcatactgtcttaaatattacaacaaaacttttctcttgtccagccccgcgttgaaattcccacgtttttttgcggtttttgtcggaaacttcaccggcaaagaccgcctcttgtgtttttcgggcagctgtgctacactatacggtagagggacggacaccgccggaaaaaacttcctgcactgcggcagacggtcctccgccggatatcaaactctattccgaaaggatggtattttagtatggtacttgaccgtggttccctgaagcgggagtccaagatgctgctgaaaaccgcacaggtcagcccttacctgtttacgctggtgctgctggccatcatgttcgtcatcaacggcatcagcgactatgtgcagatggacgacgagttcgcctatgtctactccctgcggttcgatatggatctgagcttcctggcgctgcaccgggcgttccccgcttttgcggtgtggtttgtgaccatcgtgtgcacgctgctgggcgtagtgctcaacgtcggtgcgtccctgtaccacctgggcatccgtcggggtgaggagatgcccttcgtcaccctgttcgatggcttcgccttcgccgggaagatcattctgctgtatgtcgtgcaggtcatcttcatctccctgtggacgctgctgctggtggtccccgggatcgtggcggcctaccgctaccgctttgctatgctgaacctgtgcgaaaacccggagatcggcgtcatggaggccctcaacatgagcaaggcccagaccctgggcttcaagtggcagctgttcgtgctggatctgagcttcatcggatggaatattctggtgagtctgacactgggcattctggatatctgggtagctccctaccgggcgcaggccaacatcgcctttttccaggagatcaaaaagatcaagggcgtaggcttcttcccgccgcggccggaggacgacgatcagtttcgcccccatgacccctttggcgaggataactggtaatatgcagagaacaagccccggggcatcgctccggggcttgttgtattcacgcttcggcgggagccgcttcctctgcctgcggcatctccgtcggggcgctgccgtcgaagggcatctccagacaggtcaggtcccgcaggcacctgcggaagtcgtgacagaaggcggcgtactcataaccggtgcagatacgctcgtccataacgatgcccaaaggcatcatcttcttggtcaggtcaccgttcatgtagttaggtaccggcttgcccatgcagacgaacacgctggtggtgccgaattcatagcagtggtggtggatgtagctggtcttgatagacgccagattggtgatgaacatactggtgtggaaggggctcaggtcgatgatcttccggggcagcaggccgtgcttgtccagatggtaggccagccagatcacgaacttgggcaggccggggatggagaacatcatcttggcgaacttgtcggtgctgttcttctgctccgtctggctgttgacggcgatggcatcggcgatcttctggttgatggtgaaaatagtgtccttgggctccagatagatcttcagcgttgtctcatccgggctgccgtcggcccgctttttcaggatgacaaaggagacgcagaaatggttgcgctcatagagatgactgttgaccacgaaccagttgagcttggggttggtctgataggccttgtaataggcggcgatgatcaccgccatgtggttgatgcggatcccagcgcgccgtttttcgcggatataggccttgatgccctcctcgtcgatgttttcggtgatggtgttccaggcatcgtaccgcttgggcatgatgtagggaatggctgccacgatggggggcaggtcctttactcgctttccgtcagggcgcatgagcagttcctcgattctgtctgtattgtatccatcatagaccatatggccgcggattgcaagctgttgttttcttttccgaacaggtgcggaaaagaaattttttctttacctttccgcacgatgttgatataataaagtattagtaatgttatcatgggatgaaagttccatttatcatacagaaaggaaggtgaccgccgtgcggttcagcaagtggcatatcgcgccggaaaagccggaggcgcaggcatgtctgcgcgcggccggctatccctatctggtggccgccgtgctctccgcgcgcggcatcgaaacgccggagcaggccgccgcctttctggagcgtgaggacaagctgaccatcagtcccttcctgatgcgggacatggacaaggccgcggcgcgtgtgcagcaggcgatcgcgaatggcgagaggatcgccgtgttcggcgactatgatgtggacggcattaccgccacctgtattctggtagactatctcaagagccggggcgccgacgtggtgcactacattccccggcgcatcgaggacggctacggtctcagccgtgacgccatcaagggccttttcgaccagggcgtgcgcctgctggtaacggtggactgcggtatcaccggtgtggaagaggtggactacgccaactcactggggctggacgtggtcatcaccgaccaccacgagtgccgggaggtcctgccccgggccgtggccgtggtggacccccaccgggcggactgcggctatcccttcaagcatctggccggttgcggcgtggcgctgaagctggtgctggccctgggcgggccggaccgggaggagcctctctttgcccggtactgcacgctggcggccatcggcacggtagcggacgtcatgcagatgtccggcgaaaaccgcaccatcgtctcccgcgggctggccacgctggagcactcggactttatcggcctgcacgccctgctgcgggaggcgggtctgagcgggaaggagatctcctcggtgcagatcggcttcgtgctggcgccgcggatcaacgctgccggacgcatgggcgcggcggacaaggcggcggagctgctgctgtgcaccgatcccgccgcggcggaggccatggctaaggagctgtgcgccctgaaccgggagcgccagaacgtagagcaggatatctacacccaggcggaggagatgatcgaccggatgccggagcgccagcgcagcgcgctggtgctggagagcagccggtggcaccagggcgtggtgggcatcgtggccagccgcctgtcggaaaaatactcccggcccagctttatgatccatctgaacggcagcaccggcaaaggcagctgccgcagctggggcggctttaatctgttcgccgcgctggaaaactgcaaggacctgctgctgggcttcggcggacatgagctggcggcgggctttaccatcgaccgcagcaacataccggccttccgggaccggatgaatgaatatgcccgcagctactgcggcggacagcagccggagtcggcgctggagatcgacgtggccatcgcccaccccgccgcggtgacgctggaggagctggaggccctgtccgtgctggagccctatggcagcggcaacgccagaccgctgttctgcctgctgggcgccacgctgctgcggacccagaacgtgggccagaaccggcatctgaagctgcggctgggcaagggctgcgcccagttcgacggcatattcttctccaccgtggccgagcgctgcgggtgccatccgggcgaccgggtggacgcggcattttatttgcagatcaatgagttccggggcagccggacggtacagctgcagatggtggacatccggccctccctctgcgccagcgggcgggagcaggaggcgctgacactggcccaccggtgcgccgccggaaaggccgtttccctgcgggaggcgcggcgggcgctgcccacccgggagcaattcgccgccgcctggcggtttttagaccggacagtgcccgaggacgggctgaccacagaccgcttgccgctgctgcggctgatggcggcggagctgggcggcgcggaaccggtactgcgggcagccatgtgcgccgcggtgttccgggaacggggattgctggactggcagctgaacggcgacgccatcacgctgcacctgcggcggggacaacacgtagcactggatcagtcgccgctgatgaacacgctgcaaaacgataacgagaagggaggcggtgcgctgtgacacctcaggagcaatacgaacatcttgtggagacggtaaagggctacaacccggcggcgggctttgaccagatacgcgccgcctatgaattcgccgatacccaccacgcggggcagaaccgtaaggacggctcgccctttatcacacatcccctggcggtggcacagatcgtggcggaggagctgcacctggacacagagtctattgtggcggccctgctgcacgacaccatcgaggataccaccgccacccacgaggagctagcaaagctgttttcccctacggtggcggatctggtggagggcgtcagcaaactgacgcgggtccactacacctccaaagaagaggagcagatggagaacctgcggaagatgctcatggccatggccaaggacatccgggtcatcctcatcaagatctccgaccggctgcacaatatgcggactatggagtaccagacgccggagaagcagaagcagaagtcctttgagactatggagatctacgcccccatcgcacaccgactgggtatgcagaagatgaaatgggagctggaggacctgtcgctgaagtatctggacccggtgggctaccgggagatcaccgaggcgctggacgaaaaggccgcggagtacgacgggttcatgtccgccgtgcacgaccgcatcgtcacgcggctgaaggaggagggcatcgacgccacggtctacggccggatgaagcacccctactccatctaccgcaaaatgtacacccagaacaagagcctggacgatgtgttcgacctgttcgccttccgggtcattgtggacacggtggcggactgctacaacgtgctgggcatcatccacgacctgttcaagcccattctgggccggttcaaggattacatcggcacgccgaagcccaatatgtaccagagcctgcacaccacggtggtgggcgaaagcggcatccccttcgaggtacagatccggacgaaggagatgcacgaggtggcggagtacggcgtggccgcccactggaagtacaagcagaacggccagggcgccggggacgagcgcagctatgagtgggtgcgccgcctgctggaaaatcaggaggacgccgacgccgaggactttatccactccctgaaggtggacatgttcgccgacgaggtgttcgtgttcacccccaatggcgacgtcatcaacctgccggcgggcgccacgcccatcgacttcgcatacaccatacactccgccatcggcaaccacatggtgggcgccaaggtcaacgggcggatcgtgcagttcgactaccacctccgcaacggcgacgtggtggaagtgatgaccagcaaatccgcccacggtcccagccgtgactgggtgaagatcgcccgcagcagcaacgcccgcagcaagatacgccagtggttcaagaaggaaaagcgggacgagaacatcgtcaacgggcggcagagctttgagtcggagctgaagcgcaccggcgtgacgctgaaggagctgaccaacgaggagaacctgcccggcgtgctgaagaagctgtgcttcacgtcactggacgatatgtacgccgccatcggctacggcggcatttctgcactgaaggtcgtcggccggctgcgggaggacatccagcgcatcatccaccagcatcagacggaacggcaggctgaggtccccgtggcggatcagccgcaaatcatgcgccccgccgtgccccagcgcaccagaagtgagcagggcatcgtggtggaggggctgaccaactgtctggtgaagttctccaagtgctgcacccccgtgcccggtgacgacatcgtgggcttcatcacccgcggctacggcatctccgtgcaccgggcggactgtcccaacgcggacccggcccggcgcaagcccagcgaggcgggccggtggatcaaggtttcctggggcagcgacaccaaggagagctaccgcaccacgctggagatcaccgccaaggaccgcatcaacatcatcatggacgtgtccacggtgctgtccagcaccaagacccacgtctcctcgctgaatgcccggagcacgccggacggctttgccctgctgtcgctggacatcgacgtgccggacagcgagcagctgcggaccgtcatgcggcggctggagcagatatcgggcgtcatgcgggtgacaagaccggccggataaggccaatgtgaatacaaacagtataaaggagatagaattatgcgtgctgtattgacccgtgtaaaacacgccagcgtttccgtggacggcaaggtcatcggacagatcggcgagggctttttggtgctgctgggtgtgacccatgaggacaccgaggcgcaggcggagaagctggccgacaagctgacgggcctgcgtatctttgaggacgaacatgaaaaaatgaaccgcagcctgacggatgtgggcggagagctgctgatcgtgtcgcagttcacgctgtacgccaactgcaagaagggccggcggccggactttctggcggcggcgcggccggaggtggccatccccctgtacgaaaagtttgtgcagctgtgccgggacaagggctttcacaccgagacgggtgaattcggcgcctatatgcaggtggacagcctgaacgacggaccgctgaccatcattctggacaccgacaccctgtaaggaggacgccatgaccatcaaaacactgcaagtgggccctatcatgaccaactgctacctgctgtgcgacgaggacgcgaaggtctgtgccctgatcgatcccggcgacgatgcctcccgggtggagcagctggtgcgccaaagcggctgcgcactcaagtacatcctgctgacccacgggcactttgaccacacctccgccgtgcggcccctgctggagagatacccggacgtaccggtgtacatccacgagaaggacagtgtgaccgggcggggcggcgagctgctgttcacccgggtggacgaacagcaccagcggtattataaggagggcgacgtgctgcccctgggcaggctgtccctgcgggtcatggagacaccgggccactccgagggctccgtgtgtctgctgttggaccgggagcacgtgatctttgccggggataccctgttccgctgctcctgcggacgatgcgacttccccggcggcagctatcccaagatgctcgcctccctgggccgtctggcggcgctggagagcgactggcgggtcctgcccggccatgaccgggaaacgacgctggactttgagcgccgcatgaacccctatatgcggcaggggacggcgcaatgaagctgaacctgcgcggtcacgaggaccgctacgccatcgagcagagcctgctggcctttttcccggaggagcgcccggtatatgagggcgaggacggggacagccacgcggaggtcacactgcatgagggcaatgtatatgccaccggggtcacgacactgacctatggcggcaaaacggcgcggggcgaggcccgcgttcggaccgcaggcgtttccgacgcatacgaacgggaacgcctgcgtcagcgtgcgctgaagctgtcctttttccgggcggcccgggacgtcaccggcgtgacgcccagctggggcgcgctgacgggcatccgcccggccaagctggtgcggaccatgctggaggacggcatgacccccgcccaggcggaccgggtgctgcgggacacatactgtgtctccccggcgcggcggcgtctggcgctggagagcgccgaggcgggcctgaaggccaggagcgacctgcgccccgaggacatctctctgtacatcggcatccccttctgccccacccgctgcgcctattgcagcttcgtgtcggcgtcggtggaaaaatcctttaagctgatggagccgtatctggcggcgctgacggcggaggtggaggccgcgggccgcatggtgaaggaggcaggcctgcggatcaagtcgttctacatgggcggcggcacgcccaccaccctgtccgccagtcaaatggatgcgctgctgacggcggtgaaccggaatttcgacctgtccgactgcgtggaatactgcatcgaggcgggacggccggacaccatcgaccgggagaagctgcaggtgctgctggatcacggtgcggaccggatcagcgtaaatccccagtcgctggagccccgggtgctctccgccatcggccggaagcacagcccggaggatatcgaaaaggccatggagctggccacgtccatgggctttccccatgtgaacatggacctgatcgccgggctgcccgccgacacgccggagggctttcgccggacgttggatacgtgcctgaccttcggcgcggacaacatcaccgtgcacaccctgagtctgaagaagggcagccgcatcctgctggagggcctgcccattccctcggcggaggacgtggcggccatgctggactatgccgacccggcgctgcgggaaaagggcttcgccccctattacctctaccgccagaaatatatgtccggcagctttgagaatgtaggctggtgcatatccggggcggagggcctgtataatatctacatcatggaggagctgcacagcatcctgtccctgggcgcaggcggctccaccaagatggtggacgcaaagcggaaccgcatcgagcgcgtgttccaccccaaattcccgctggagtatatccagcggccggaaaagctgacggagaatttagaggcgttccgccgcttccatcaggagatggggcggtgagataaggaggcaccatgacccaccggcggcaaaacttcatgggcggcgcggccattctggccggggctgtggcggtgacaaagctgctgggtgccctgtacaagatcccgctggggaacctgctggaccgggagggcatggcgcatttctacgccgcgtacaacatttacagtctgctgctggtgctgtccacagcggggctgccggtggccctgagccgcatggtgtcccgtgccgccgcccagcggcgctatggcgccgtgcggcgctgcctgcacctgggcctggccctgctggcggcgctggggctggtgtgctctgccgttatgtgcctgctgccggaggccctggccgccgcgctccatgatccggacgcggccccggccctgcggacgctggggccggcggtgctgctggtatgcctgtcggcggcgctgcggggctattcccaggggctgggcgatatggtgcctaccgccgccggacaggtggcggagtccgccggcaagctgctcatcgggctggggctgtgcctgtacctgctgcggcagggtgcggggacggacctgtgcgccgccggggccatcggcggtgtcaccgccggggcgggcctgggcctgctggtcaccgccctgctgctgccccggcgggccgcactgccggaagtgcgcgacgtacccccggcgagcagccgcgtactgcgggagctgctgcggaccggcatacccatcaccgtgggcgcggcgggcatgagcctgatcaccctgctggaccaggcgctggtgacggccaccctgcgggacacgcttggctatacaacggcggagaccaccgccctgtatggcgaatacaccttcggcatgacactgttcatgctgccgccgtcatttatctatcccctatcggtaagcctgatgccggcggtatccgccgcgctgacccgccgcgaccgcactgctgccggaatagcggccggggcggcgctgaagctgacggtgctggcggccctgccctccggcgtgggactgtcggtgctggcggggcctatcctgcacctgctctatcccgcggtgccggaaaccgccgaggcggcggcctatcacctgacgttcctgggtctggcctgtgtgttcgtatgcctgatggtggccaccaacggcgtcctgcaggcctacggtcacccgctgctgccggtgatctccctcctctgcggcggcatactgaagatcgtcaccaactacctgatggtgggcgatcccgccacgggcattcggggcgccgcggtgagcacactgtactgctacgcgctgatcgcggtcatcaacctggcagccatcgcacggctggtaccggagcgtccggggtatatctccctgtttgccaagcccgttcttctgacggcggtgatggcgctggcggcccggtccggctatggcctgttctgccgccttctgcccgagagatgggcggtactgccggcggtgctgctggccgccgttgtatacgtggtgctggcgctggccatcggcgccgtgacgcggcaggatcttcagaccctgccgaaaggggaaaaactggctgaccggctgcatttgcggtaaaattcctgaaatgcagcgaacttttccccagttgcagtggaaaacctcttgcaataggagcgtaagtatgataaattttacaaggaaaccacgctatggctacgaagacctgctggagatcatccggctgctccgttcgccggagggctgtccctgggaccgggtgcagacccaccagtccatccgccgaggaatgctggaggaggcctacgaggccgccgaggccatcgatacggacaacgccgcactgctgaaggaagagctgggcgacgtgctcatgcaggtggtgttccacgccggcattgaggccgacgccgggcgctttgacatggatgacgtatgcgacggcgtggtaaaaaagctgctgtaccgccacccccacgtgttcggcgatggtcaggcggaaacggcagacactgtgcccgccagctgggagcagctgaagcggcaggagaagggccagaaaaccactgccgatgcgctggatgccgtggcccgcagtctgccaggtctgtggcgggcggagaagatacagaagaaggctgcggaggcgggcttcgactggcgcgacgtctccggcgcgctggacaagctggacgaggagactgccgagctgcggcaggcggtacgcgccggcaccaatgtcgaggaggagctgggcgacgtactgttcgcctccgtaaaggtgggtcgcttctgcggcgtggacccggaaacagctgtcaacggcacctgtgaaaaattcattcgccgcttccgcgcgatggaggaggccgcggccgcagagggccgcagcctgtccgacatgacgctggaggagatgaccgccctgtggaacggagccaaagaatgttcttaatgcgatacaacatcgttttaggatagccgcccattgcggcaattaccaacgaaaatttttgggaggaaataacatgaataagactgaactgatcgccgctgtcgctgagaagaccggcctgtccaagaaggactctgacgctgccgtcaacgccgttctgaacaccatcaccgagaccctgaaggctgacgagaagatccagctggtgggctttggttccttcgagaccaagaagcgcgctgcccgcaccggcctcaatccccgcaccaagacgcccgtgcagatcgccgctaccaagatccccgctttcaaggccggcaaggccctgaaggacgccgtggcagagtaagctgacgtatgcaaaggctggtgtggcgacacaccagcctttcttataggagggaccccatgcgtttggacaaatatctgaaggtctcgcggctcatcaagcgccgcaccgtggccaatgaggcctgcgacgccgagcgtgtcaccgtcaacggccgggtacagcgggcatcctacgacgtgaaggtgggcgatgtgatcgcgatccgtttcggtgcaagaacgctgacggttgaggtagtgtccgtcaccgagaacgtgggcaaagacgcggctgcggccatgtataaagaggtctgaggacaaacccggcataaaagaacaagccccctcatacgatggtaaaaaacgcatcccggcacagggccggggcgcgaaaaccgtatcgtaggaggggactttttatgccgtatgatatcaccgatcctgccaccgcccaccgcttacagctggaggggcgggagaagctcaccgtctccggcgtagaggacgtggagcgcttcgacgaccagtgcatcgtgctgcgtaccggcgcgggcgtgctggtggtcagcggagagagcctgcacatcggcaagctgagcctggatggcggcgagctgcacgtggacgggcgcatcgacgcgctgacctatgaggatgcgccggaggtccggggcggcgggctgttcagccgcctgttcggctgaggtggggaccgttgtctccgagcagctgcgttcgtacctgaccgcagcggccctgggcgcggcggccggggccgtctatgacctgctgcggctggtgcggctgcgccgtcggcgggaccggcggctgacccatgggctggacgcggcgtttctgctgctggtcgctccggccctgctgtggtacgccctgcgggtagggcagggcgagctgcggctgatcatgctgaccgccatgggcctgggcgcggcggtgtatctgctggcgctctcgccgctgatgcgtccgctctgggacttctggctcagcgccgccgcgggcacaggccggctgctgtggtggccggtgaaaaaatttacggcggcggcgaaaaaagcctttattttttgtcggaagtgcgttatgataagaaaaaagcgcgctgcggaaaaggaggcggaacgccatgcagaaagggcaggcgcacgcaaagaagcaccggacaaatcccatattgctgctggtcattctcgcgctggtggtgtttttaggcgtggagctgatccgggtgggcaagcggctgaacgaggccgcgcagcagcaggccgcgctggagagacagctgcagcagcagacgcaggagaaccaggcgctggagtctgacctggccaagaaggacgacgaggagttcatcaaggacctggcccgcgaccagctggggctggccgaggccggcgagcgaattttctacgatgtgaatgactgaaaagcagtccccggcagcgccgggggctgctttcttctgcgaagaatacagcaaaaggctccggcgaatgccggagcctgtgctttttgtgaggagaaaatgatatcagggaagaaacggcgccgtctgcttacgcaggggcgaacgctcctgataagcgatttactctgcggcctgagcagccttcttgttgcggccgagagcgcggatgccctccaccaccagatcgatggccagaatcaccagcagcacgccgatgataccacggatgtagaaccacaccacaccctgaccaccggccatgatgccgacgatctgagccttgatggtgaacaccagggaggtcagggtcacgatcagcatgaagaacatggggaagtagaacatcttgttgttgcggccgatcttgcccagccagcagcacacagccagcagacccagagcagccagcagctggttggcagcgccgaacagagcccagatcttggcatagccggtcagacccagagccacgccagccaccacggtgataccggtagccacataggggttggtgataacgcgcttccagccggtcagatcctcgcgggtcttgccgggctcgacaaagaactcagcgaacatatagcgggccagacgggtggcggtatccacagaggtcaggcagaaggcggacacggccaggatcagcatggagtacaccacgttgtagcagccggagccgaacaccttggagaacatggaggccagaccggtggcaaacacgacggtaggcgtcgtggtggtgccgtcagcatactggttccagatgtaaccaacagcgcagacggagatcagagccagagcgcactcgatcagcataccgccataggcgatgggcttggcgtccttctcctgatccagctgcttggacgtggtaccggagcccaccagggagtggaagccggacacagcgccgcaggcgatggtcacgaacagtgcagggaacatatagcccagggacgtgccgctgggagccagggtatcatagaacccggtaaacgcgggcatatccacggtgggggagcagccgacgatgcccacgacagccaggatcatcatgccgtacagcaggaaggagctcaggtagtcacggggctgcagcaggatccaaacgggggtgacggaagcaacgccgatgtacagaccgacaatgatcatccacacggtgtagttcagatagatgggatgccagttcaggccgatgatcatgcagaccacgatgccgatgacgccgatgaccgtggaaatgcccagaggcgcgttgcggcgatagacaaagaagccgaacagaatggccatcaggatgaacatgatggagatgatggcggtggaggcattggcagcggaagccgcatagtccacagcgccgtcagcggtgtaggtggccttgaaggtgttggccacgatggaggcgaatgccgccaccaccaggatcaaagtcaggtaagcgaaggtgatgaacagcttcttggccttggcgccgatggcgtcgccgatgacctcaccgatggactcgcccttgtggcgaatggaggcgaacagggcgccgaagtcatgcacgccgccgaagaagataccgccgatcaggacccacagcataacggggacccaaccgaacacagcggcctgaatggggccgttgatggggccggcaccggcgatagaggagaaatggtgacccatcagcacgggagccttggcaggacaataatccttgccatcctccatggtatgggcaggagtcggacgggagttatccacgccccacttcttggccagccagccgccgtagaagatataacctacgaccaggacagcgcagccaataataaggaacaacgcagcattcatacagctctctcctttctgaatagcgatttcttttgcttatgaaacaggcctctttcgaaaacctgtgctgcactatgtccgctggcattggtgctgatcttttcctcaggcagcaccaccagcccggtatgaaagtccatccagccccagtaggacagcttgaagctcttgtagagcttgcagcgcttcagtgccttgcgggcgtcttcgtcgcagctgtcacagacaaacagcgcggtgatataggtatacatatgggtggagtttggctggatgcgggccataccctgttcgtaggccagcttttcgcacctttcatatatctccttcgtcagatggggaacattgaaaaggtacacatattcaaagctgttggcctgccagagcttggcctttttggagagcacgtacttctcggcggtggcgtagaaatccatcgtggcggccaaggcgtgctcgttctcttcgcagcgggtcacatcatagctgccggcgtacacatcgcacaaacggtcgacggcttcctgtcgggtcatagcggctcctcccttttcataacgatttcttagcattcaggacgtggttcatcgttcctttcgcaattaaaactgcgaaatatttataccggaaaagttgcatttcctgttttttagcaaacaaacacgcccgcccactaataacatcattactatacgccggtgtttttcaactttcaagccgcaaaatgaacaatttttgaacattaagtttgtataaatttttggttgatttgtgcaaaaaaatgtggtagtttgaaaacgttaccgacacttgccgttttttttgttttacgaggcgctgtcccgcctgtaagaacggtttgcgccggtttcgttttttatcagcggacaaattggaaacgttgccgccttcacatccgcaatttcctgaaaaggtaagaaaaaaacaccatcccgtgggatggtgttttgtgattttttcggttactgtcaccccaggtggcgctcgaaattgccgccggcatggacgccctcctgcacgatgtagaaggcatccgggtccacccggcgcagaacatcctgcagggtgtcgatctcatacttggacaggcagacacagagcacctgcacctcgtcgccggtccagccgccccggcccgtccagctggtaacgccccggtccaactgctccatgatgtagcggggcagctgggggtcgttcttcttggtgaagatcagcagctgtaccgtaacattctgccggtggatacggtccagaaacaggctgctcagcacattatatatagcggagtagatcgcggtggtggcgtcgaacaggaagaagcacagggtgtacagcagcgcgttgaagaaaatggagaaccgacccacggtgaagcggctgcccttcttgctgagatacagccccaggatgtccaggccgccggtggagcagccgcaggtcagcaccaatccagaggcaaaacccgccaggatgccgcctaccatacagctggtgaggatatccggaatgaccggcgtggacggcgagggaatgaccgccagaaagacagagttgcagacggtgcagatcgctgccttccagaaaaactcccggcctagggccttgtaggccagcaggaacaagggaatgttcacgaagaaatacagtacaccggccaggtcgaagggcagggagagagacagctcccgctgcagaagggtacggatcacctggcacaggccgtaggccccgccgccgtagaggccctgaggcacgatgaacacgttgatggccacgctgagcagcaggccgcccagcagaccgccgatcaggcgcaggctcttgttgtgcatgagtttctgatacatggagcgatactccttttcttccatggtaatgtcagtaataccggcaggatacgtaggtgatacatatatggtacgtatacggtacgtatatagtatgtggcggaacgggaaatgtcaagcacttctcgttccgccgcggatcaaaagctatatcgcaggcagcgctccagtctgcggagcgcccggtgcagtgaacgggacaccgtggacttgttgacgcccagcaccgccgcgatctgggtcacgttcatgtccctctccatgtacagcgccaggacctcccgctggcggggcgtcagctccgccgccacagccttgggcaggttccgcagcagccgacggcggcgttcgctgttgtccccggcctgggtgtggagccagaactcaagacccgcccgatccatggggtcatatacggtactcgccatagccgcagaagctcctgtcgtagtagcgggccgtcagttgggtcaggcggcggcactgctccagcatgggccgcagctccgcgatccggcggcgcagacgccgggcctcctcctgatcgccggtggtacgcagggccaggcgcagctgcgccagccgcccggccaccagcgcggcgctggcgtcgtactgtacggaaagttgtgataatgtcatatgcgatccccctctttcgttgttctgcatggttcttttgtgaaagctgtataactttaaagcgataaattttctgtttcctgataaactttcttgttgacattgagggaaagctctggtataatacggttcgctggtgagatgctggtgtagctcagctggtagagcagctgatttgtaatcagcaggtcgggggttcgaatccgtccaccagctccaattgaatacccgtatatttgggggatttcccgagtggccaaaggggacagactgtaaatctgctggcaatgccttcggtggttcgaatccaccatcccccaccaaaaataccgatcagcccttcaggcggtcggtatttttattgtcaacgccgcggtacctatcatgtgcacgccccgagagaagcggcccagcccgccgcaaaagagcacgctccggcgtgctcttttcgttttttgccgccccctctgccgccgtttgtatccacctcctccacgccacagcattcttgtgacaaccccctttcaaaaccaagaaacttgttgatgacgctactgtatcacaagaaacttgtgatgtcaagtcaaaaatcacaagtttcttgtgattatcccttgacaaaaccaaaaatccagcgtagtatactgtcaaaagcagtctgtatttgtcgaggaggtgcgcggcgtgtcttttggtgaacaaatgcggcggcggcgggaggagctggggctgacccggcaggcgctggccgaccgactgggagtgtccgtatccgccgtgggcaactacgagacgggcatcagcgcccccaaggaggaggtgctcctgcggctgtttgacgcgctggaggctgagcccaactatctgtaccggggcagctaccgcgccgcctccggcggccacagtgacgaggagcgccgtctgctggccaaataccgggatctgcccctgtccgggcgccagaccgtccacacgctggtggacgcgctgaccgaaatgactgacgacctgcgcgccgccgcacccgccgccgagaggcgggtcatcccgctgtacacatcacccgccgccgcgggctttgccgccccggtgttcggcgaggactatgagctgataccggtcaccggcgacgtaccgcccggtgcggagctggccgtgcggatacagggcgactccatggcgccggtcatcgccgacggcgccgtggtctacgtgaaccacgacccggtgcaaagcggcgacgtgggcatcttctgcgtggacggcgatatgctgtgcaagcagtactaccgggatccgctgggtatggtatacctgttctccctgaaccggaagcgctcggatatggacgtgatattccaccggggcagcggccgcagcctcacctgcttcggccgggtgatgctccacacccagcccctcccggagggacatatataacgaagcagcccgcctctttcgaggcgggctgcgttttcgcggtcacaatataaatcctccgtcgcaggtgagcacctgcccggtgatgaacgacgccttctcgtccgccaggaagctgacagcggcggcgatgtcctccggcgtgcccagacggcccagcggcgtctcctgcgccagctgggggagtacctccggcggcagagcgcccagcatatcggtcttgatgacacccggcgcaacgcagttgacccggatgcccgttggcgccagctccgacgccagcgaccgcgtcagcgcgatcagcgcgcccttggtggcagagtacgtcacctcgcagctggcgccccgcaggccccagatggaggacacgttgacgatgcacccggcgtgttcgcggagcatatggggcagcaccgcctgtatggtgtggaacgccccgtccacgttcacggcgaaataccggtgccacagggcgtcggtgatgtcctggaacagcgcctgtcccgccacgcccgcattgttcaccagcagcgacacggggccgagctcgccctccacccgccgcaccatctcgttcacctgcacccggtgcgccacgtccgcctgcacggccatggcgcggccgccggcggcgctgatctccgccaccagtgacatggcgcagtcctgccgctcccggtagttgacgcacacggcgtagccctcggcggccaagcggcgggccaccgcccgtccgatgccccgggaggagccggtcaccagcgcgatcttttccatgggatcatccccttttcacagtctttccccgtgagtatagcaaatttccgcgggaaaggcaagaaaagtgttgacaaaccggggttgatagggtaatatactatcgttgtctgcgcggttagctcagctggtagagcacatgcttgacgtgcatggggtcacaggttcgagtcctgtaccgcgcaccacgaaaacctcggaaccacaagggttccgaggttttttgctttgcaaattttgaattcgagtcagtgacgcacgccaaaaaagccccggggccgaaaaggtcccggggcttttggagcacaggaagcgttgtaaaacggcagcggtttgtccgagacgcagcggcgcttatccctcgctccgcacaggcggaaggacctgaaaatcgccgcggcgctccggcatggcgtcgccgtactgcttgaagtagtccaggatcagatcggacatttccgtgccgatctcccgcaccacggggcagcccacatagcagtcatacccgccggtgccgctggcgcggtagctgttcaggcagatggtgaacacatcggtatccgccacgggctttccctgcacggtcatggcagcgacccgctgccccaccgggcgggagatatcgtaggtgtaggacacgcccatgtagtagtcatagttgtaatgctccaccttcggctccaggaagcagtccgacacccgcagggtgccgtcgtcgttccgggtaaagtatgccgcgctgcgctccatcgcctgccgcaggacggcgccggtgatctccagcaccgacagcgtgttggtgtaggggtaggcgatcagcagatcgcgccgccgcaccacccgcgggagccccgccgcgtcgttggccaggctggaggcggacagctgcgcgccgctggcccaaagctgcaccgcgttgaacagatcggggaggccgctgcctccggccgccatgtgcagcggcgtgtccggcatcagaggctgcggcagatggcccaccacctgatccagccagtcctgggcgccgcgctccatgccggcgaactcgtccagccactcccggcggcatgcaccggatgcggggatcgtctcgctggtgaagcgcttgcccgtttcggatatggccgcctcgatgtgcaagaattcctgtccccggtcggtgggctgcaccacgaaagtaccgcacagcgtctgcccgtggacggtcatgtgctggtgccctgtcagcagaaggtcaaagtccagctcctggcacaggcggtaggccacgttctcatgggtggtggacagcacgcggccggtggccagatctctctcgaagccgccgtgataaatgcacagcgtcacatccacccggccccgcagggattccagcgccgcacgcgcggcggggatagggtcgctgatagtgatgccggacaggtgctccggcttctcccagatgttcacgtagtcggtgacgatgcccacgatgccgatccgcaggccgttctccagcgtgtggatacgggcagggaagcgcacgcgggcgccgtcccagcggacattctcgcagacgcagcgggcgtgcagagcgttgagatagctgtccagatagtccatgccgtagttgaagtcgtggttgcccagggtcacatagtcgtagccgcagcggttcattatctcggcgaaccggctggcgtcgcccaatgtgtcatggcagtaggcacccagcggcgagccctgcaggatatcgccgccgtcgatgaccagcgtgttcccgtccttatgaaactggctggcacacttgaacagaccgatattcctctcctgccggctgcggtagtcggtgggatagatataaccatggaggtcagaggtgaagtagatggtaaagcgttttgtgtccatcggctcacccccgtgccagcttgatacggatccgggaggatatccactcgatgatcagcaccagcacgatcaggcccagcaggatcgcgcccacctcgttccagcgataggcgctcatggcgaagatcagcggcgcgccgataccgcccgcgcccaccaggcccagcaccgtggcgtcgcgcaggttcatgtcgaagcggtagatgatggtggaggtgaagtccgccgtcagctgcggcagaatgccgtagcggatcttctggaacgtggtgcagcccgcggcgtccaacgactccaggatgcgcttgtccaggtcctcgatgctctcgataaacatcttggacaccatgccgatggagcacagggacatggtcagcaggcctgcgaaggggccggggccggtgacgcggatgaacatcaggccgtagacaaaggcgggaacggtgcggatagcggcgatcagaatgcgtcccaccagcgccagcggcttggggaccagattgctggcggagataaacgacaggggcagcgagatcaccgcgcccacgatggtgcccagaaaggcgatgcagaacgtctccagcagcagataaggcacaccgttggtgcccagtgtgaacagcagcttggcggagggatggaagatgccggagatgatattcccggctacctccagcccgttgctggtggggttgctggtctgtacggccgtgccggaccacgccagcaggcaggccacgatgaaggccgccagcagctgccacagccacgttttcggcgcggaggcgcaggctttttgaattctctgttccatacggccctccttacgtcagtttcttacgcagggcgtggctgatcgcctcgatgaccataacggccacaaacagaacgatcaggatcatgccaaggctgtcgtactcacgccagccgatcttttcattcataataaggcccagtccgcctgcgcccacgtagcccagaatggaggcgtagcgcacgttgccctccaggcagaacagggatacggacagataggtgggcagcacctggggaaacaccgccgtggtaaaggcctgcagccgggtggcgcccagcgcctccatggcctcatagggtcccatatccaccgtctcgatgatctcgaagagctgcttgcccacataggcgaaggtaaacaccgcgatggcgcaggtgcccgccatggtgcccaggccgaagatgtaggtggcgatcagggcgcacaccagcgtgggcagtgtccgcacaaggctgagaaacagccggacgatgaacaccaccacgcggttggtgacgatgttgctggcggcggctacggcaaaggggatcgccagcaccgcgccgatgaacgaacccaggaaggacatcttgatggtgtcccacaggggctgccagatcttgctcagataccccgtgttgggcgggaacatggccgcgaggatatcgaaaaacttgctgcccttcttcaccaacaccccgaaatcgaagccggtgatgtgcacagacagcgcgcccagcgccagcacgatcagaatgaccagcggcgcgcggctgcgtttttcctccaccactgcgccgttgggcagcgtatagcggcggggcttgaacagacggtcgtacaggctcatgcgtctgcctccgtctcgctgtcgtcaccgtagatggcgtccagcaccgactggtccacattggcggagggcccgtcatagacgatcttgccggcgcggatgccgataatgcggtcggcgtactccagcgccagctccacatggtggatgttcagcaggatggagatgcccatctcctcattgatgcggacgaagtcctgcatcacctgcttggcggtaacggggtcaagggcagccaccggctcatctgccagaatgatccgggggttctgggtcagtgtgcgggccagcgccacccgctgctgctgaccgccggagagctggtcggcgcggatgtaggccttgtccagaatacccaccttatccagcgattctagcgccttgatcttgtccgcctttcggaaggcacccagcagcacccgccagaagggcatatccggcacgcaggcggacagcacgttcttgatgacggtggtgcgggtcaccagattgaaggactggaacaccataccgatgccccggcggaaccggcgcaggctcttgcccgacagggtgctgacatcggtgccgttcaccgtcagcgtgccggaggtgatctggtgcatccggttcacggagcgcagcagcgtggacttgcccgcgccggaacggccgatgatggccacaaactcgccgtcctgaatggtcaggtccacgtcgtccagacccaccgtgccgttgggatacaccttggatacatggtcgaaaatgatcatatggtctcctcttttcctgaaatagcacacggggagggctgcacagcggaaggtcatggctgtgcagtcctccccgcgcttgggaaagtgctttagttggcggcagacagctcctggatgagcttctgcgcggcgcgctcgttgtcgtaatcggaagcctgtgccacctgatagccgttgtggctgtagatagcgatgacttccttaccggcatcggtgttgccgatgttgatgaacgcctgctgcagcgcggcgatcaggtcagcgtccatgatctcggagttcttgctgacggagatggtgtcgttgtagatgggggcggtcacgccgatcacgccggtctcctcccagatggagccttcacggctgaactcggtgttccagcgctcggcatagtcgcggcgcgcgtcggcataggtcaccagcacgtccacctggccggaggccagacgggcaaaggcgctggcgtaggagtcggactgcacggcgctcttcaggtcagagatgcccttgccgtagtgatcctgcagccacagggcgggatagatgtagccggcgggggaagaggtgcccatgacgctccagttggcgctgtccaggtcctcccaggtcagctcttcgccggcgttgaccttcttcaccagctcctggcccttgtcagaggggccggcgatgaacagggcgcggtaggaaacggcctgcttgtcggaagcctcggtgggctggccgtcattccagtccttggcgttgtcggagtccttgctcaagccgtcgcgggtagcggtcagaatgacctcggcgccgtcgtcatacagcacataggtgccgccggggatcagacccacgtcgatggtgccggcctcaaggccctcgcccacagcctcataggtggtgccgacagtgatctccacgtcgcccacctcgtagccctgcttggccagctcgtccttcagcatctgcttcaggggctcggtaacggtaatgatctcctccggctcgcgggagggcacgaacgcgaccttcagggtctcgatcttcttcgcgccgtcggtgtcgccggtattgtcgccatcggtcttgtcaccgcagccggccagcaggccgagcgccatgaccagcgccagcagcagagcaaaaaactttttcattcttttttcctccataaagtgttgttcccttgcccggagtagttctccgggacgtgtacagcggcatggcacagcaaaaggcgcaccataccgtctcacagtatagcacacctttatagagaaaaattttccgatttggtaaaaaaagtaatatctcaggcgtccctctcccgcccgaagtagaacgccaccagctcctcgaacgccaatatcacatggccgaaaaagctgttgggcaggctgccggccagcgtctgccgcgagccgtccaccacaaacacgatgtccgacatctgtgccagggtagagtcgctccgcttggtgaacgtgacgatcttgtggccgttctgccgggcgtgacgcacgtcgttcagcaccggctccgtctcgccgctctggctgacggcgaacatcaccggcggggcctccgccgcgtcggacaggtggtgcgcgtcgcggaacagcatatagtcatagaaatgaacgttgttgaacaccataaagccgcagatagacagccgctgggcgatataggcacccacaatgttggaaaagccttcgccggtggtgaacagcttggcccggcgcgactggtccagcaggccgcagaaccggtccagcagctcgtcggaataattgtcgatcaggctcttgatattctccgcgctgcggtcctggccgtgggagttgaactggcggctgaggtagtagtacagctcgctgtatccgtcaaagcccagccgcttgcacatcttgacgatggtggtggtggagagaaagttctcgttggcgatctgctggatacccacgcgcttctcgccgcgctcgatatgtgccgtgatgctggtgatcacccgtttctcgtcctcagaaagcagatttgtcagcagaaaatagccgtcgcccacagcctgtccctccttgccatccatgatatttttttcattatagcaaaccgggcggcgccttgcaagacagcgcgggagaattcggcattccgccgatgcggcggcctccgcgccgtcccgggcgatagcagatgacaaaagaggggtgtgatcacccctcttttgttctgccgtttccgaagcggcctgcgcggaaccgtcagcgcgcaaacacagtctctccgttgaacgtcagcttgcagatgcgctccggctccatgggctcatcgaaccgcgcccaaaccatgcagctgtcgtcggcttgatccgcaataaagctccaatcgcaggggatagacttgccgtcctcgtcaaacgctttgaacgcgctgaggatgccagtggtggagtccacataatcggcgaagtacaccgccatggacagcttggagcattcgattttctccgccgtgagcacctccccgccataggagagggaaacgctctccgccagcacctcgctctcaacggtgacgggcgtttcctccagcgtgacccgccagtcccccggcagcacggtggtggtgatctcctttccgccccagtgcagttccaaataggggagcgcttccttgtcaacggccacatcccgccaaaagtaccgccagtcggcatccgtggcatccgggtcaaactcgtcgggctgtccgaaatgacagtgggactccgggtagatgaccgtgtccgttcgcgtgtccaggaaataccagttcttctcccaggacgcggaccattcatccgagcccagcggttctttcatcaccagatggagagtgccgtcctcccatccggcgttgcagatggacgcgccgcagggcagctgcacgtccgcgtcccccggctgccagtaataccgcaccgttccgttgcggaatcgctgctggcactggggcagctttgcgttctctccggcgttttccaccatctccgccacgttgaagtcgatcgtctcgtcgtcgaaccaccgtttctcctgccagttggcgaaggtcatcaccagaccgttggcactgctgcccggctgccagtcggcgtgtacgacgccctccagctcgttcttcggcacgccctccttccgctccagaaaatacgacacataggcgccggacatcatcttgccggggaagtacagctcaaagtcggcgaattggccgctctgatccagcacagccccctcgttggccttcacagaatagagaagatacagggtgcgctcgtccgagatcaccttttccacacggatgtgcagctcctccgcagctgccgtgggttgctgttgggagaccaccggcgtctcgtccccgtcgccgatgacagtctgttcaggagaaaagatgtcgcgccatgacagcggcagtctgctgacggcaaaggcggtcacggatacgcccagtatgaccagcatcgccacgcacgcggcggataatttagggaagcgggctgcccgtttccggcccgcgttcgcggcatcaaaatcaagggcctcctccagatatgccgcatccacgtctccgatggcggagagcagcttttcggtgttgtgctccatcatagagttacctccttgcgttccaggtacgtatgtaatttcctgcgaattctgcccagccggacagatacgttgttttcagtggtaccgaaggcatccgcgatctcggacaacggctgcgcgaaccagtaccgcctgacgaacatgacccggtcatcccggcgcagggcagcgagaaacgcattgatctgcgcggacagctcacctgcggcaagctgctcgtcgagggaatgggcggaaatgcagtcctccagttcggatagcgagacctcaaaccggctgctccgcttcagcgcggaattggcccgcagctttttcaaagagaggttgcggacgatacggcagatataggctctcagcgggtcggggcgctgcgggggaatgctgttccacgcgccgagccaggcgtcgttgacgcattcctccgcgtcctgcgggtcatccagaatgttgtcggcgatttggaagcacagcgcgccgtacttccgtgacagctcggtgatcgcctgctccgagcgctcaaaaaacaggcgtatgatctgttggtcctccatggggcgacgtacctcctttcgccttcttcacacattaactacccttttgaagcaggatatgacgcttcctttcaaaatccttacgaagtatattatatagtaaaaagagcgcctaagcgctctttttgtgtctgcacccgatatatcccacggaaacgggcgcgaatatgccgcggaaaagggtcggccgcgcattgcttttatggccgtatgttcggcgaggtgttgtcgatgatctcccatttcccggttttcgcatcctgcgtcaagtagaagtgctgctccgtgcagccgtcgttcataaacgtttttgtgtggtcgtacgccacatagtattttgcccggacgacgacaaaatgctctgccagatactcgtccgtccagcctcttgacgcggcgagttcgctgccggcgtacattttaacgacacgcgctgtttcgctcttatccacttcgatctcatccacacgcacacaaatcgtatatgctttatcggcttgcccttcgatggcactttgaacggtttgcgccggatcgggagacggcctctgaagccaccggtcaaacagccccagctcgtgtgccgtaaaaccgcagagcgccaatgcggcgatgatggcggcggccagtacggccagctttttagtgcctacttttgatgtgtgcgggcgctcatagaaaagagcctccgtgatatatttgtcctccagtgcactcatggcatcggtaagcttcactgcgttcacacagacacccctctttctatcagatattcccgcagcttctcacgaatacgggacagtcggacagacacatttttctccgttagtcccacaaattcggcgatatccctgccgctgtcgcaaaaccaatagcggcgcataaagataacgcggttttcagcggtcagcgtgtccaaaaagctctctatgatgcgggctaactctctggcttcgatctctgcgtccactgtgtcgggagatgctatgcaggcttcgatctcctccatagccgccgcgcagcggccgcttcgtttggccgctttctttctgtaatagttgttcagggaagtattccgaacgatcttgcagaggtaggtcagcagcgggtcgggtcttgccggcggtatcgtgttccacgcgccaaggtaagcgtcgttgacgcattcctccgcgtcctgccggtcgtttacaatattgtatgagagccgataacacgccttgccgtatttcgtatccagctcccgtatcgcctgctggtcgcgcttgaaaagcagatcgatgatctctgcatcctccatcatgtacaccgcctcctttccggcttcacctatgtactacggttttaacggcaaatgctacatcaatttaaaagatcatatcagatttttgcaagcgcttacacccatgccgcttacaccgcttttcttcgccgtgcgttcccccaccccgagctgccggccgaacagccgcagcagctccgacgtcagcccgccgatggctgtatattgatttcgccttctcaacaaacgtgttcacatcggaggcggcagctcttagtttctccggcacgaccgtctccagttcgaacgtgcggattttgagatgcgaaaaaaggagcacccccggcggggtgctccttcggtcactttttgtcagcacagcttggcgccggcggggacgctgtcgtcgatcagcatcaggtgcagcttctcctcacccttctccttgtgcacggcggagatcagcatgccgcaggagggaattcccatcatcttccgcggcggcaggttcaggatggcgatggccgtcttgccgatgagctgctccggctcatagtactggtgaatgccggagaggatgatgcggtccgtgccgctgccgtcgtccagagtgaacttcagcagcttgtcgctcttcttcaccgcctcgcagttcttgatcttcacggcgcggaaatcggacttcagaaacgtatcgaagtctacctcatcctccacatagggctccagctccacggccggcagggcggccttcttctgctgctcctgcagctcgttcagcttggccagggcctcgtccacatcgatgcgggggaacagattatcacccttgctgatgaccgcctggttgggcagcacgccccacacgttggcgttgtcccagctgcggcaggcctcgtccgcgcccagcttggcgaatatcttatcgcaggtgtcgggcatgaccggcagcagcagggtcgtgcagatgcggatggtctccagcaggttgtacagcacggcggccaggcgctcgcgcttgttctcatccttgcccagcgcccagggggccgtctcgtcgatatacttgttggcccggtcgatgaccttgaacacctcgtccagtccgttctgcagctgcagcttgtccatctccgcctgatagcggtcacgcagcgcgcaggccatcttcttcagctcgcagtcctccggagcgtcctcccgctgtacgggcagcttgccgccgaagtacttttccgccatgccggtggtgcggctgaccaggttgcccagcttgttggccaggtcggtgttgatggtgccgatcagcagctcgttgctgaagttgccgtcgctgccgaagggaaacgtccgcagcaggaagaaccgcagggcgtccacgccgaacatctcggacagggcgtagggatccaccacgttgcccttggacttggacattttgccgccgtcgatgaccagccatccgtgaccgtacacatgcttgggcagaggcatacccatgctcatcagcatggcgggccagatgatgctgtggaagcgcacgatctccttgcccacgatgtggtagtcggcgggccaatacttgtcgtagtcgttatacttgtcgttgtcaaagcccagggcggtgcagtagttgaacagcgcgtccacccacacatacaccacgtggccgggatcaaagtccacgggaataccccagctgaagctggtgcggctgacgcacaggtcctccaggccgggcttgatgaagttgttgaccatctcgttgacgcgggtgcggggctgcaggaagtccgtatcctccagcagatgctgtatccggtcggcgtacttgctcagccggaagaaataggcctcctcctccgcgtccttgacctcgcggccgcagtcggggcacttgccgtccaccagctggctctcggtccagaagctctcgcagggggtgcagtacttgcccttgtaggtgcccttatagatgtcgcccttctcgtacatggtcttgaagatcttttgcacggcggcgcagtgatagtcatcggtggtgcggataaaccggtcgttgctgatgttcatcagcttccacaggtccagaatgcccttctcgccctccacgatgtgatccacgaacgcctggggcgtcatgccggcctccttggccttcgtctcgatcttctggccgtgctcgtcggtgccggtcaggaacatgacgtcatagccctgcaaacgcttgtaccgcgcgatggcgtcggtagccacggtgcagtagctgtggccgatgtgcagcttgtccgaggggtaatagatgggcgtggtgatataaaacgtcttcttctccataggatagttctccttttccccgttccgaatggaagaacggtataaactcacatatatcattttagcccacactatgcgctttgtcaatcagacccgtatgtaaaataccgtatttttgcgtaaaaacccatttacagacggcatcatattctgtataataaggaatgttgattttacccgctgtgccgcggaacaaaagagcataggaggaaaacaaacgtgtcttacagaattcttgtagtcaatcccggctccacctccaccaagatcggtgtctatgaggatgagcagcttctcttcgacaagaccctgcgccacagtgcggaggagatcgcccagttcaacactatccccgcccagaaggactggcgccgcgacctggtaatgaaggcgctgcgcgagcagggcttcgacgcccgcaccctctccgccgtctccggccgcggcggtctgctgcgccccattcgcggcggtacatacgctgtcaacgacaacatggtcaaggactgcaccatcggcgtgcagggacagcacgcctccaatctgggcggcctgatcgcccgcgagatcggcgacgagctgggcatcccctcctacatcgtcgaccctgtggtcatcgatgaaatggcagacgtggcccgctattccggccaccccctgttccagcgcgtcagcattttccacgctctgaaccagaaggccgtggccaagcgcttcgccaaggagcagggcaagaagtatgaggatctgaacctcatcgtctgccacatgggcggcggcgtttccatcggcgcgcacatgaagggcagcgtggtggacacccagaacgcgctggacggcgagggtcccttctctcccgagcgctccggctccctgcccaccggtcagctggtgaagcagtgcttctccggcaagtacaccgagggggagatgcaccgcatgctctccggccgcggcggtctggtggcctacaccggctccaacgatatgcgctatctgctggcgcaggccgagcacgataagaagatcgccggcgtggtggatgccttccactaccagatcggcaaggagatcggtgccatggccaccgtcatgcacggcaaggtggaccagatcatcctcaccggcggcatcgcctacggcaaggagaccgtggacgccatctccgagatggtcggctggatcgctcccatcaccgtctatcccggcgaggacgagctgctggccctggcccagggtgccctgcgcgtcctgaagggcgaggagaaggcccaggagtaccgccgtccccgtcccgaggacaacaactgatacaacagagaaaatgaaacgtcccgcggctctcgccgcgggacgtttttgccttgacaatagcccggtttcccgatatattgaggatatcacatataaaaaggagagagaaatcatgatgcctaccaccatgctcattatcgccggtgtcctggccctcgtcgccactgtcctggccttcatctatgtggtcccggagaagaagcgggaaaagctgggcgcctttggcaagttcctccacgatacctgcaacttcaagtacctgatggtggaaaagatccttcaggccctgtacatcttcaacaccgccgccgttatcatcttcggcgtgctcatgctcttccgcaccgagtacaactactggaccggcgaccgcatctggatgggcggctatggtctgctgatcatcatcctggggcccattgcgatccgcctcagctatgaattgatgatgatggccatcttgctgctgaagaacgtcatctccatcaaccacaagctggccgatcagaccggcaacggcagcggggacgtgttcgccgccccgaatatgcaggagatgaaggaggctctccgccagcgccgtgaagcggcacaggcggcacaggcggcacaggcggcacaggcggcacaagctgcgacacaggcggcacagagccagcccgccaatttctgcagccagtgcggcgccaagctggagaacggtgtctgcccccactgctccgcccccaaggacagcgccccggccgacagcacaccgcctcaggaataaatcaggcaaaaaaagaagcacccgcccgggtgcttctttttttgttcagcttacgatcacatagcttccgctttgcggtgcctccgccgtcatggccaccacccgcgtctccgggtcatagccctccggcagcgccgcctttacggcggcaaggtcgccctccgccggcacatacagccggtcgaacagctcagccatctgctccacggacagactgtccgtgttccgcactaccaccgacagggctgtgccctccggcagtgccgaccgcagattttcggcaaagtcggccagcacctgcgccgggtccgccgccgtgttggcaacgcccgtcgtatccgacgggtagcagaactggtccagcaggacctccttaaagcccagctcgccgcactccttcaccagcgcggtgatgtattgcagcacctgcgggtcggtggggtccagccaggcctgcccctccgcgtcgtaccacagctgcccgtcctcccggaccagcgccgtttccggcacgctccgggcgtaggcgctgtcccggaagcacacgatgtgccccacggtgtaccgtccgctgctcagtagtgtacgcagacattcgatgggccgtcccgtctccaccaccacgccccgcggcgtctccacgtccgtggcgtaggtgatgccgccggtggtacgctttaccgccagcaccaggtcctccggtgccagcgtgttcatgatgtagtccgcgccccaccacaggcagtcgtccggcagccgcgtgccgtgcagcgccgccaccttcacatggggatgctccggcaccaccgtgtccacgatgtcatcccggtctccggtgccgtcgacggtgctgtcatccgttttgtcatcacggtcgtccttcctgtggaaaaagggaaggtcgatggtggcgttgcccgcctcgtcgtataccacgtaattctgcaatgccagataggccagcgcgcccaccagcaccagcgccagcaccacgatcagcacgatctttccgccggacattcggccacggtagctgttgtatccctttgtcgccatagacgttacctcacaaagtcacgtttctctatcggaacgcgctcactggatggcatccagcagcgccacacgccgggcgtgacgtccaccttcaaactccgtgtgcaggaagatctccaccatccgcttggccagattgccgccggtgatgcccgcgcccaatgcgagcatgttggcatcgttatgccgccgggtcatctccgcctggagagagtcggtgcacagcgcgcagcgtatacccttcaccttgttggcggcgatggaaacgccgatgccggtggtgcagatcacgatgcccttgtcgcattccccggcggccaccgcccgggcggccttctcggcgaatacggggtagtccacgctctcggtggaatagcacccgaagtcctcatagtcgatgtcgttctcctccagccagatgaggatgtcctgcttcagcaggtagccgccgtggtcacaggcgatggcaattttcatagtggtcgtctcctttgtgtttttacagcttccggaacgtgggctttccgccctcaaacgtgcagaaataccggaacccgcacgtccgcagcagcgcctgcgtttcccggacgcagcagcctacatattcggcggagtgcgcgtccgagccgatggtgatgatctcgccgcccgtctcccggtacagcttcaacagcggcgcgtccggcaggggcacgttgccccggttggtgttgcactcgatgccgcacccgctttcgatcagtgcccggaaaatctcccggcactggtcgtaatgaccgtcgaaggtcatctgctcgcccagattttcattcatgtaccgcagcggcagcgtcaggtggcccagcacactgaacctaccccaccgcgccagacgcagtacgtcctccaagtagctgtctatgactctatgataatacgtttcgctgtttttttcaatgtaatacaggtcaaaatgtttgaatttttcgcctgccatatgcacggagcctataacaaagtccagctttggcgcctcgcccagcagtttctccgcccggtcaaagcccatgggcgcctcgcccagctccgcccccagccggatggccagccgcccggtgtatgtctcccgcgcctccggcagctcccgcagcagccgcgaccagtcgaaatgctcccggggccggtggtcgccccacagcaccgtgtccacgtggtccgtcacgcagatctcatccagcccgacccgcaccgccgcttccgccagctcactgaccgtcagctgtccgtccggcgacgtggccgagtgggtatgatagtccgccagatacatccttcacctgctcatttcttcttgaagaagctcttgcgcttttcgtagttgctctcgcccagcatatcgctgaagctccgcagggcctccttctgctccttcgtcagatttcgcggcgtctctacgttcacggtgacatactggtcgccgcggcctctgccgttcagcaccgggatacccttgccccgcagccggaacaccgtgcccgtctgggtgccctccggcaggtcgtatttcaccttgccgtcaatggtggggatctccagcgtggcgcccagcaccgcctgggcgaaggtgatgggcgcgtcgcagaacacgtccacgccctcccggcggaatgtctcgtccggctgcaccatgacggtgatcagcaggtcgccggcgctgccgccgtttttgccggcgttgccctggccccgcagagagatggtctggccgtggtcgatgccggcggggatgttgaccttgatggtcttgcgtttccgcacccgaccctgtccgccgcagtcggtacagggctgatggataatgcggccggtgccgtgacacttctggcagggacggctggtggcaaacacgcccataggcgtccgctgctgcacctgcacctggccgctgccgcggcagtcggggcagatctccggcgtggtccccggctggcagccgctgcccttgcaggtagcgcactgctcgctgcgctccacggtcacgtccttctcgcagccgaaggccgcctccttgaacgtcacggacacgctggcgcggatgctctcgccccgctggggcgcgttggggttacggcgctggccgccaaagccgccgccgaaaaagctgccgaagatatcgcccagatcgccgaagtcgaagccgcccgcaccgccatacgcgctgccgcctgcgcccgcgccgtagctgggatccacgcccgcgaagccgaactggtcgtaccgggcctttttctccgggtcggacagcacctcgttggcctcgttgacctccttgaacttctcctcggcctccttgtcaccggggttcatgtccgggtggtactttcgggccagctttttatatgcttttttgatctcgtcctccgatgcgcccttgctgacgccgaggacctcataataatctcgtttttcctgtgccatgggataaatctcctattgccagtcttgttgcctgcggagccgactccatcggcaaagcgatggattttgcgtcctgccgatggcagaccgacgacggcgtaccgcgtgtacgtcgaggaggtctgacgatggcagggcgcaaaaggcgcgcttttcctaaacgccgcgacaagggacaggtataccctgtcccttatcacgggatatatttgccttacttgttgttttggtcatcatcgtcgactaccttatagtcggcgtcgtagtactgctggccgccgttggggtcgccgccgggctgctgaccgcccatgttggggtcaccctgaggcgcctgctgctggtacagcttctcgctcatcttgtagaacagctgggtcagctcctcggtggccgccttgatggcgtcggtgtcctcgcccttcagggtctccttcagcttctccacgccggcgcggataggctccttctcgctctcgggcaccttgtcgcccacctcgttcagggtcttctcggcctgatagaccatctggtcggcctggttgcggacctccaccttctccttgatcttggcgtcctcggcggcatactgctcggcctccttgacggccttctcaatatcctccttgctcatgttggaggaggaggtgatggtgatgtgctgggcgttgccggttcccaggtccttggcgctgacgttcacgatgccgttggcatcgatgtcgaacgtgacctcgatctggggcacgccgcggcgggccggggcaatgccgtccaggtggaagcggcccaggctcttgttggcggcggccatctcacgctcgccctgcagcacgttgacctccacggaggtctggttgtcggcggcggtggagaagatctggctcttcttcacagggatggtggtgttgcgctcgatcagacgggtgcacacgccgcccatggtctcaatacccagggacaggggggtcacgtccagcagcagcaggcccttcacgtcgccggtcagcacgcctgcctgcagggcggcgcccatggccacgcactcatcggggttgatgcccttgaacggttcgctgccggtaaaactcttcacggcctccaccacggcggggatacggctggagccgcccaccatcagcaccttggccaggtcgctgggcttcagaccggcgtcggacatagcctgacgcacggggcccatggtggcctccaccaggtggccggtcagctcgttgaacttcgcccgggtcagggtgacgtccagatgcttcgggccggtggcgtcggcggtgatatagggcagattgatgttgctggtggtcacgccggacagctcgatcttggccttctcggcggcctccttcaggcgctgcatggcgaccttgtcgccgctgaggtcgatgccgtcggacttcttgaactcggacaccagatacttcatgatgcactggtcgaagtcatcgccgcccaggcggttgttgccggcggtggccagcacctcgatcacgccgtcgtcgatctccaggatggacacatcaaaggtgccgccgcccaggtcgtagaccatgatcttctgtgcctgctctttatccacaccgtaggccaatgcggcggcggtgggctcgttgatgatacgcttcacgtccaggccggcgatcttgccggcgtccttggtggcctgacgctggctgtcggtgaagtacgcgggcacggtaatgaccgcctcggtgacggtggtgcccagatacgcctcagcgtcggatttcagcttctgcaggatcatggcgctgatctcctggggggtgtagctcttgccgtcgatggtcacgcggtgatcggtgcccatctcacgcttgatggaggagatggtgcgctccgggttagtgatggcctggcgctttgccacctggcccaccatacgctcaccggtcttgctgaacgccaccacggacggggtagtgcggttgccctccgcgttggggataacgactgcctcgccgccttccatcacggctacgcaggaattggtcgtaccaaggtcgataccgataactttagacataatgattgcctcctgtatatagataaatatttattgcttactgtatttgatctggccgcttaatagggccggtccggcatgatgagcgcggcaatgatataggccagcacaccgcttccgcccagcaggcagaacaccacccacgccaaacgcaccagcgtggagtcgatgttgaaatactccgcgatgccgccgcatacaccggctatcttcttgtctgtgctgctcttgtacagtttcttgccttccatgttcgttacctcccactcagttggctaccttcaccatggcgaagcgcagtattttgtcgcccagtgtgtagcccttttggaatacctctaccacggtgttctccgccgcggtctcgtcctcggtgtgcatcaccgcgttgtgcttttccggatcgaacttctcgcccagggcgggtatctccgcaacgttcagcttggtcaagacctcctcgaactgcttgcagatcagctccagtccctgccggtgtgcgtcgccctcctcaaattggctcacgccccgttccaggttgtccagcaccgccagaaacggcttgatggtgtcgatcttcgcgtcattgtacaggtgctccttctcgcgcgcagtccgcttccggtagttgtcgtactccgccgccagccgcaggtatttgtcattggcgtccgccagcgttttcgccagcgcctccatctgctccatctgtgccttggtgacggtgtaggtatcctcggccgcctcggccgcttccgctgcgttctccaccgcttccggcgcggcttccttcgcggcgctctcggcggcctctgtcgccttcctgttctttttattatccttttcgctcattccgttgtatcctccggtagctgttttttaccaaacatgcggctcaggctctccgcaaagtagctcagccgcgccgcgaccgcggcgtaatccatacgcgtgggacccacaacgcccactaagccgcgcatattatcgccgatatcatagctggcgatcaccacgctgctctccttcagggcgtcgttgacgttttccggcccgatgagtatctgcatgggcgcgtccccggcaggcacaggcagctcctgcttgttgtccaccataaagctcatcaggtcgtgggccttgtcgatatcccggaattccgggaatttcagcagctggctggcaccgctggtgtacacctgctggtggttggactcctccagcagcgacccggcgtactccgtcacctggttcaaaatcaggaaccattggccggacacctgttcgctgaggttcatcaacgtggcgttcatctgctccgcggacaccccggtaaagtgggtgttcagcaggtgactcagctgcggcagcgcctccgcctcaacgggcagcgacgtccgcatcagctggctctttacccggctgtccgacagcatcaccacggcgataaagccggaggcgtccacgccgatcagctcaaaccgctgtaccgtggccgccgtgcggtggtccgctacagcgtaggtgggatagcccacaaagctggacaccatctgtcccgcctggtcgatgacctgctccacctgctgcaggggcttcgccagcgccgtattgatgctggcctcctcctctgccgacagggtcttgcggtccatcagctcgttgacgtacagccggtagcccctggccgatggaatgcgccccgccgaggtatggggctgctccagatagcccatgtccgtcaggtcggccagctcgttccgcacagtggcggagctgaccttttccggcatcagcgccacgatggccttggagcccaccggttcagcggtgttgatgtagctgtccaccacgatcttcagtatttgcttttttcgttgggtcagttccataagtccattctccgtttagcactcgttatctttgagtgctaaacgcagtgtaccaccggcgggaaccgttgtcaatagccggggttttaattatttgtgaacaacggaaaaaagggcgtcccgccgcggcgggacgcccttttttatttatatataatgtgttatgactgcgtcggaggtacgccatctgtcctggcaggcttgccggaacggatgtaatcctgcaccagcacatagaccaccgagcacaccggtacgcccagcagcatacccagcacgccgaaggcgccgccgccgatggtcaccgccgccagcacccacagtcccggcagacccacagacttgcccaccaccttggggtagatcaggttgccctccacctgctgcaatatcagcaggaagatcaggaaggtcagcgccttgatgggactttggaacacgatgaggaacgcgccggtggccgcgccgatccacgcgccgaaaatggggatcagcgacagggacgcgatgatgaccgataccggcagcgcgtagggcaggcgcaggatcagcataccgatacagcacagcgtgcccaggataaacgcctcggtcacctgtccggtgacgaagctggaaaaggcgttgttggtcaggctcagcaggcgcataagacggtcggcggccttctggggcaggatccgccgcagcaggcggcgggactgtgccagaagcgtctccttctgggccagcagatacagggagaacaccagcgccagcaggaagttcaccagtgcggacagaatggacgtagtgatgttcagggtggtatttaccacgctgtcgcccttctcctgtaggaaaccggtgatggtatccttgacctggtcggcgctgagggacagctccggcagcgtcacgccgtgctcggcagcgaagtcgctgagatttgtccaccagacctggatctggttcacataggtggggatattggctaccatagtagtgccggcctcctccagacgggggataaggatgaagaagatagcaaaaatgatacccaggaacagcagcagcgtcagcgtcaggcagacaggccgcttcagcttggcgttccacggactgttccatttgatcaggccgcggtcccacaggcgctccagcgccaccatcatcaggttcagcacaaacgcgatgcagatgccgatcagcagcggtgagagcaggtccagcagactgcccagcacaccgctgatccacttcaggttgttcagtccccagtacagcagtgccgcaaaggcgatcagcagcatgatccgcttgatatttttcttattcaggtccaaagccatcccgcccttcggtcgtgttacactatatattatcatgtcctgtgtaaagtttccatgcaaaaagcggcgcaaagtggaaaatttttgtgaacagtccggcggcgcctatcaaaaatacttttccctatcggaaactcccacttgcattttgtcgaaccattcgataaactgtaaggtgactgaaagatttttcacatatggaggtattccctatgaagcagctcaaccgctgggtctacgccattgtgggcgtcatcgtcctgctgttcgcaggtctcgtgtacgcctggagcgtgctgtccacccccatcggcgcagagttcaccggctggacaaaggcccagctgagcctgacgttcaccctggtgatgatcctgttctgtatcggctccctgctgtgcggcctgctggccggaaggctcagcgccaaaaacgccgtgcgcctgggcgcagtcctgtttctggccggctttttcatcgccagccgctgccagtcgccgctgacgctgtatctgggcttcggcgtgctgtgcggcctcggctccggcctgagctacaacgccgtgatgagcaccatggtccgctggttcccggatcggcccggcctgatctccggcgtgctgctgatgggcttcggcggcggcagctttctgatcggcaagctgtaccaggcctggacacctgccggcgtcggcggctggcgcaccagctttctggtgctgggcatcgtatgctttgcggtgctggcggtgtgctccttctttttcgtagcacccggtgcggactttaccgccccggcggtcaagggcggcaagaccgtgtcccgtcccgctgccgcggatgtcactcccggccaaatgctgaaaaaaaccactttctggctgtactacgtctgggccatcgcggtcagcgctgccggactggccctgatctctcaggccagcggcgtggtgtggcaggccagcgccgaccagacggcggcctccgtggccaccatcgtgggcctgatctccatctgcaacgccgtgggccgcgtgctcttcggcgggatgtacgacaagtacggccgcagcctgtccatgcagctggtgaacggcctgttcatcctgacctctgcggtgctgctgctggccatgtccagaggcagcgtagcggtggtcatcctgggctttgtactgggcggtctggcctattccggcgtcacgcccaccaactccgccttctgccgcgcctatttcggtcccggccactatccggtgaatttccccctgatcaacacgaacctgatcttcgccagcttcggcagcaccgtctccggtgcgctgtatgacgccggcgggtcctataacagcacgtttctcctgatcatcggcctggcggcggtgggtatcgtctgctccctggccatctctgccatcgacaaaaagggaaactaaggcacagaacagagcgcctgacccgctgggtcaggcgctctctttattcggatatgcggaacagacgcttgccgttttccagtgtggcgcgggccagctgctccgcgggaacgcccttccactccgccagcttctccgccaccaggcggacataggcggagtcgttgcgctcgccccgatggggcaccggggtcatgtaggggctatccgtctcgatgagcatacggtccaggggcgtgacggcggccacctccggagcgcggcgggcgtttttgtaggtcacagggccgtcgaagcccaggtaccagcccaggtccagcagctcccgcgccatctccgggctgccggagaagcagtggaacacgccggtaacatcggggaactcccgaacgatggccagcgagtccccgtgggcctcgcgatcgtggaaaatgaccggtaggcgcagcgcgcgggccagcgccagctgggcgcgcagcacctgctgctggagcttccggggcgggttctcagcccagtagtagtccagaccgatctcaccgatggccgccaccttgggctgccgggccaattcacgcagcacatcgatatccgccgggacaaagccggcgcagttctccgggtggatgcccacggcggcgtagacatgggggtaggcagcggcgtaggacaccgccttgcgggagctgtccagatcgcagccggggttcagcaccagggcgacaccgcgctgcggcaggctctccagcagcagctcgcggtccgggtcgaaggcctcatcgtcgtagtgggcgtgggtgtcaaacagcatggctcacgcctccagacggaccttgcccagggtcgtgctgtccacgttctgctccttgatggccttcaggcgggccatgtggggctgctgcatatggacgcgctggtgttcggcgctctgccagcgctcgataagcagcagctcgttctcgtcctgggcagagaagtagtaatcataggccaggcagccgtcctcctggcgaataagggtcaggatgccctcctccaccagctggcggacaaatttctcccggcagccgggcttggcctggtagcggacatacagcatgagttcttccatcgtgcacctccggtgtttttttgctattgtagcacttcgggcgggcaggtgcaaatatttctacggctaagcgcaaaaaagcatttacaagctgtataaaataagatatactttacaagctgtattttatttccgggtgggatatgccccggagccaagacaagatagggtgggagagaaacatggcaacggatttttccagaacactgagcctgctgcggcaggagaagggcatcagccagcggaaggcggcggcggcgctgggaatcagtcaggcgctgctgagtcactatgaaaacggcatacgggagccgggtctggccttcgtgtgtaaggtgtgtgacttttaccgggtgtcggcggactttctgctgggccgcaccgccaaccgggacggcgcgatgatcgactcggaaacgctgtacgacggcagcacggagaagggctccctgcgggggagcatcatggccacgctgcagaagaagctggcggtgaacaccacagggctgctgttcgacctgctgagccgcaccaacagccgggaggccatcaccgccgccggagactgcctcggcgccacgctgtacgatctgctgcggcggctgtaccggcaaagcggcggcaatgaggatctgttcgccacagaggcggtggacttcgatgccggcgcagtggacgcggcgctgctgcggagccgcggagcctatatgcgggcactgacggagacggaggcactgccccacctgaactccgacgcgctgaccaccctgcccggcatcgggcagagcgccgcccaggtcatccacaacgtggacgaacgggcagggaagtaaggaggttttctgtatgtttgaccaatcccatatccgcaatttctccatcatcgcccacatcgaccacggtaaatcccttccccaacttgcctgacggcaagccggggtcccctcttttcatttgacatcctcggcggaaatgaattccgcctgcggcaaggttttgctccgcaaaacgcttgtgcgcgctatccgcgcggtcagcgtggatttaccctaaggaggttttctgtatgtttgaccaatctcatatccgcaatttctccatcatcgcccacatcgaccacggtaaatcccttccccaacttgcctgacggcaagccggggtcccttcttttgatttcacatcctcggcggaaatgaattccgcctgcggcaaggttttgctccgcaaaacgcttgtgcgcgctatccgcgcggtcagcgtggatttaccctaaggaggttttctgtatgtttgaccaatcccatatccgcaatttctccatcatcgcccacattgaccacggtaaatccacgctggcggaccggctgctggagaagtgccacgccgttccggagcgcgagatggagaaccagctgctggacaatatggacctggaacgcgagcgcggcatcaccattaaatccagagccgtgcgtattttctataccgccaatgacggggagacctacgccctgaacctgatcgacacgccgggccacgtggacttcaactacgaggtcagccggtctctggccgcctgcgagggcgcgctgctggtggtggacgccacccagggcgtggaggcgcagaccctggccaacacctatctggccatggaccacgacctggagatcctgccggtgttcaacaagatcgacctgcccgccgccgatcccctgaaggccaagcaggaggtggaggacatcatcggcctgccggcactggaggccccggagatctccgccaagctgggcaccaacatcgaggccgtgctggaggacgtggtacagaacgtgcccgcgcccaagggcgaccccaaggcgcccctgcaggcgctggtgttcgacagccagtacgacccctacgtgggcgtggtggtgtatttccgtattaagcagggcactatgcggaaggggcagaccatccgcatgatggccaccggcgcggagtacaccattctggagtgcggctacctcaagcccatcggcaacgagccgacggacgccttacaggccggcgaggtgggctatttcaccgccagcatcaaaaacgtgaaggacacccaggtgggcgataccgtcaccgacgcggtgaaccccgctgcggagccgctgcccggctaccgcccggcgcagtccatggtatactgcggcatctacaccgaggatggcagcaagtacccggatctgcgggacgcgctggaaaagctgcagctgaacgacgccagcctgaccttcgagccggagagctccgtagccctgggtttcggcttccggtgcggctttttgggtatgctccacatggagatcatccaggagcgtctggagcgggagttcaacctggacctggtgaccacgctgcccagcgtcatctaccacgtctacaaatccgatggcaccatggtgaaggtggacaacccccacaactaccccgaccccggcaccatcgagcacgccgaggagccgtatgtcaaggtgtccatcatcagtccccaggactatgtgggcaacatcatgcccatgtgccaggagcgccggggcgagttcaaggatatgcagtatctggacacccacctggtggagctgcactaccagatgccgctgaacgagatcatctacgactttttcgacaccctgaaagccaacaccaagggctacgccagtctggactatgagctgtccggctaccgcaccagcgacctggtgaaggtagacctgctgctcaacggcgacggcgtggacgccctgagcttcatcgcccaccgtgacaaggcctatccccgcgcccgccgcctgtgtgaaaagctgaaggagaacataccccgccagctgttcgaggtgcccatccaggcggccatcggcggccgcatcatcgcccgtgagaccgtcaaggccatgcggaaggacgtgctggccaagtgctacggcggcgacatcacccgcaagaagaagctgctggagaagcagaaagagggcaagaagaagatgcgcaatctgggcaccgtgcaggtacccacggaggcgttcatggccgtccttaagctggacagcgattgacaaaaaaagaaaccgcctgcggcggtttctttttttgctctattcgatcgtgccgaacagcgcccaggtattgctgtcggtgatctttacttcccggtattcgcccagatcagcccggtcgccggtgcagtggaccaggcggccgccggcggtacgggccgtcaggggccagcgggcgtcgtcgctctcgccgtccaccagacagcgcagcgtctgccccacatactggcggtgcagctcctcggagatgccgttctgcacggcacagagccggtcaaaccaccgctgcttctcctcacgggggacggggtcctccatcttcgccgccggggtaccggggcggggggagaagataaacgtaaacagggcgtcgaagcggaccttctccaccagggccaccgtctccatggcctcgctctccgtctcaccggggaagccgatgatcacgtcgctggtcagcaccaggtcgggcatgaccctgcgggcgtaggtgatcaggtccaggtatttggccacatcgtaggggcggttcatggcgcggagcacccggtcgcagccggactgcaccggcaggtgcagctgcttggccacatggcggctggcggccatcacgtcgaacagcttgtggctggcgtccttgggctgggaggacatgaagcggatgaggtagtcgccgtcgatcttgtccaggtcggtcagcagatcggcgaagtcatagccggcgcccagatccttgccgtaggagttgacgttctgccccagcagggtgatctcccggaagccgtcggccaccagctcccgcacctcgtcgatgatcctctccgggtcgcggctgcgttcccggccgcggacgtagggcacgatgcagtaggagcagaagttgttgcagccgtacatgatggacacccacgcgcgggtgcggccctcgcggaccaccggcataccctcggcaatggcgccgtgctcatcctccacggagaacaccctgcgccgctgggtatagacctgatacagcagctcggggaacttccacagggcctgcgggccgaacaccagatccacatggcggtaggactggcggaccttctcggccacctccggccgctgcgccatgcagccgcacaggcagatcacctgcgccgggttggccttcttcgtgtgggtcagcgcacccagattgccgtacacccgcttctccgcgtggtcgcggatggcgcaggtgttcagcaccaccacgtccgcctgggccggatcgtcggtgaacgagcaccccatggcccggagcatacccataatgtgctggctgtcggccacgttctgctggcagccgaaggtatccaccagcgcgcggaggggccgggcggcgtgcatctccttcagctttgcttcaaaatcccgctggcggtccagctgcgcggcggggatctgtacctgtgttctttccaagtggacctccctgcccccggcgggggcgaagttaaaatatcgtggacagtatagcacacccggcgcggaaatacaaggacggcggggccataggcaaaaagacgccgcccccggaagggacggcgcaagcgggtgggatattggaaagcctccgaaccgtatagtacaccggggcgaagcgcttgtaaataggagcttttgccgcattttggcggaaaaagtcgaaggctgtcgaatttgaccgttccgcgaattttttgtgaacatttcacaaattcttccaaaccctcttttcaacgcaagacatatttgctataattagtcaaggataaggggaaaccactccctgacccttgcaccgttatccgttacggaaaggagcaaacactatgaagttcacattcgcctgcaagaagatctctctcaacgactccatcaaggaatacgccgagaaaaagatcagtaagctggacaagtattttccggaggaggcagacgcctttgtgacctttgctgtggagaagaaaaaccgctgtgtggtggagctgaccatccgcgccgccaacggcacgctgttccgcgcccagactgaggatcccgacggcgatatgcgcagcgccatcgacgaggccgtcagcttcatcgaccgccgcatccgcaagaacaagacccgcctggccaagaacctgcggcccgacgcgctggtgtccaccgtgcccgccgaattcgacgtggtggaggacaacgacttcgacatcatccgcaccaagcgcttctctgtcaagcccatgactaccgacgaggccgttctgcagatgaacctgctggggcactccttctatgtgttccgcaatatcgagacgaacgccgtgtgcgtggtgtaccaccgcaacaacggcggctacggcctgatcgagacggaggagtaattcacatacacgacacgagagagcaccgccgaaaggccgcctgacacaagaaaacacacggttttgcctgtgtctatccggctgaaatcgaccgaaaaacgcccacatgcgtcagcatgcgggcgtttttgcagccaatttcagctcgaatttactttggcaaaactgcttcgcaccgaaaaagagcgcgttttgtgcagagccgaggcgcaccgccgcaggcatactggatgtctgtcaaggcggcgcaacgatggggctgcgcgaaacgcgccttttgcggcgtatgttttcttatgccaggcggcctaaaggcggtgctctttttttgctggcggatcccgtcattttgatgcaaatgacccgccgctttatccgatgctgtaagtatattcactaaaatcacatattttgtggataaatattcaaattttccttgacattcccggactgtggtggtaaattatgcaacatcaacgagagagatgcaccggacggcggcaagcccatccccggaaaacgcacaccggaaaggcggtacgacccatgaaaaatcaccacatcaaaggagtttgcacgatggcactgctgcgacgacgacaggcgcaccgcctgcaccacgcggcatgagctctcccgaccacatacattttatacatgaataaatattcaccatatacggaaggatatacgaccatgaaaaagtttgtttctttgcttctggcgctgatgatggcgctttctctggcggcctgcggcagcaaggccgatacgacagccgaggacaagaccgatgacaccaccacagcagagccgaccaacgcgctggaaaagatcaaggccgacggcgtgctgaccgtgaccctcagccccgacttctcccccatggagtttgtggactcctccaaaaccggtcaggaccagtatgtgggctttgacatcacgctggccaagtacattgccgagaacctgggcgtggagctggtcatcgagcctatgggcttcgacgccagccagaccgccgtgtacaccggctccgttcccatgagcatctccggctactcctggacggaggacagagcccagaactatgagctcagcgattactactacgccggtgaaaacgagacgagacaggccctgctcatcaaaaaggagaacgcggataagtacacctcccccgaggatctggccggtcaggacgtgggcgcgcagaacgcctccctgcagatgcagctggtgactgagcagctgacgggtgccaatcccatctccatcggcgacatcaccgtgggcgtcatggagctcaagagcggcaacatcgaggcgctggccgtggcctacggcaacgcggagatgatcgtggacgccaaccccgatctggtcatctgcacctgggaattcgacgtgaaggccgagtattccgccaacgttatcatgatgcagaagggtgagacggagctgctggacgcggtgaacgccattctggcacaggccaaggaggccaacctctacgacggctggtacaaggacgccgtagagctgggcaagagcgagaacgcacaggagctgacactgaactgacacggatatacaccgcggcggcgggtacgaaagccgtacccgccgccgtatacacagtaagaggaaatcaccatgaaattcattgactttgaaaagctggcggccctgttcctgaaatactgggacaaattcctcatcgacggcgtgtcgtacacgctggcgctggccgccatcaccgtggccttcggcgcggtgttcgcctctgtgctggcactgatgaagatgtcgaagataccgccgctgcggtggctatccaccatctacatcgagatcatccgcggcacgcctatgctgctgcagctgtatttcttctatttcggcctgcccatgctgatcccggcgttgaacaagcagaagttcctctgcatcgccatcgccctgatctgcaacagcgcggcctacgtgtccgaggtcatccgttccggcatccaggcggtggatccggggcagaaggaggcggcgctgagccttggcttcagcgagagcaaggccatgtggttcgtggtggtgccccaggcagtgaagaacatcctgcccgccctgggcaacgagtttatcatgatcatcaaggacacgtccctgggctccacgttcttcatcggcgacctgatgacccagtacctggtggtcaagggcgccacatacctgcccatcgagccgctggtgatcgtgggcgtcatctacttcattatgacgttcgtgctcagcaaggtgttcggccactttgaaagaaaaatgaagaaggccgaccggaacaacggctatgggcgcaagcggaagcagcagcgggaggtgcatatctgatggcacagacacttatccaggtcaaggacctgaagaaatactacaacggcggcgacgtcaaggcgctggacggcgtcacggtggacgtgtacaagggcgacgtcatcgcggtgatcgggccctccggcggcggcaagagcacattcctgcggagcctgaatctgctggaaacgcccacctccggctccatcatcttcgacggggtggacatcaccggcaagaaggtggacctccccctccatcggcagaaaatgggcatggtgttccagcacttcaatctgttccccaacaaaaccgtgctggagaatctgaccatggcgcccatcaagatcaaaaaagtccccaagtcggaggccgagcagaaggccatggcgctgctccagcgcgtgggcctggcggacagagccaacgactaccccgcccagctgtccggcggacagaagcagcgtgtggccatcgtccgggcgctggccatggagccggaggtcatgctgttcgacgagcccaccagcgccctggacccggagatggtgggcgaggtgctggaggtcatgcaggagctggcccagtccggcatgaccatggtggtggtcacccacgagatgggcttcgccaaagaggtgggcagccgcgtgctgttcatggacgccggcaagatcgccgaacagggcacccccgccgatgttttcgatcacccccagagccctcgccttcaggatttcctgaagaaggtgctgtgaaaaaggagcagacaatgaacgatgcaaaaaaggcggcgctggccgccattgacgagaagaaggaactggtggcagaggtggcggacgccatctgggactatgctgagctgtccatgcaggaggtaaagtccgccgccctgttcgtcaaggtgctgaaggctgagggctttcaggtggaggaaggcatatgcggcatccccaccgccttctccgcctccttcggcagcggtgggccggtcattggcctgctggcggagtacgatgcgctgtccggcctttcgcaggcggcgggcagcaccgcgtaccacgagctggtgaagggcggcagcggccacggctgcggccacaatctgctgggcgcgggggccatggccgccgccatcggtctgaagcactatctgacccagaccggaaaaagcggcaccgtcatcctgtacggctgccccggcgaggagggcgtggcgtccaaggcctatatggctcgggagggcctgtggtacggccttgacgcggcgctgacgtggcaccccggcgacagcagcgaggtgactaccggctccaccaactcctgcatccagatgatctacacgttccacgggctggcgtcccaggcatccaccgcgccggagcggggccgcagcgcgctggacgcggtagagctgatgaatgtgggcgtgcagttcctgcgggagcatatgccccgcgacgcccgggtgcactactccattctggacgcaggcggcgtaagccccaacgtggtgcagcaccaggccagcgtcctgtacatgatccgttccaacttcgtcaaggactgcatggccctgcaccagcgggtggacaagatcgcgcagggcgcggcgctgatgacgggcaccaccatcgagcgccgcttcgtggacggcctgtctgacaccgtgtgcaaccacgcgctggagaaggtgctgtacgacaacttctcccagctgggcgtaccgccctgcacggcggaggagcacgctttcatggaggcactatccgccacctacgaggggcgtgacgtccccggcggcgtgggcgcggagaacgatcccgccttcgccgaaaaggtgaaggccatgcagaccggccacttcaacgacttcctgatgccgctgtatcagggtcccgccttcaacgccggctccaccgacgtgggcgatgtcagctatcagtgccccacggcacagatccatgtggcggtgtggcccaaccacgtcccctgccacagctggcaggtggtgtcctgcaacaagacgcccatggcccataaggccactgtgcacgccggcaaggtgctgtgcgccgccgccatcgatctgctggagcatcccgcgctgctggaggccgccaaggccgagttccggcagcggacggcggccgggtacacctgccccatcccggcggacgccgtgccggcgcccctggagctgtaaagaaagaacacccctgacctgccggtcaggggtgttctcttacagatgcagctccttcagccgccggaagctgcggctcgccagcagcaggcccagcgccgccagcaccagcgccgccgcgcccagcacccaggtcagcgtgtccgtcagcccccggctgcacagccaggagaacagccggtaggcgcccatgaccagcaggatgcccgccagcagcagcgccaccagcacggtggaattctcgcagttgtctatcttcttcatggcgtcctcccctgcgccggaacggccccggcgcttccgcataccatcataccatccgccgcacagcccgtcaagggcagagagccggggactgtcctcacgggcagtccccggcttcgcgtttacgccagcagagcgcggtcgttgtcgtattcctggccgctgaccttgctgaacagcgccagcaggtccggcaccgtcagccgggccttcttctcgccggagatatccagcacgatccgcccgttgtgcagcatcagcaggcggttgccgtagtggatagcgtcgcgcatattgtgggtgatcatcagcgtggtcaggtggttctcccggaccaggcggtcggtgatgtccatgacccgctgggccgtctggggatccagcgccgcggtatgctcgtccagcagcagcagcttgggcttctgcaaggtggccatcagcagcgtcagcgcctgccgctgtccgccggagagggtgcccaccttggtggtcaggcggtcctccagacccagacccagctcccgcagccggcggcgatagtcctcgcgctcgccgcggcggatgccgggacgcagggtgtgatgccggccgcggcgctccgccagagccaggttctcctcgatctccatgccggcggaggtacccatcatggggtcctggtatacgcggcccaggtagcgggcgcgcttgtactccggcagagaggaaacgttgacgccgtccagctcgatgctgccctcgtcgggctgccaggtgccgcagatggcgttctgcatggtgctctttccggcgccgttgccgccgatgacggtgacgaaatccccgtcccgcagcgtcaggctcaggtgatccagcgccacgccgtactcggtaacagaggtacccagaatggggatctctgcggtggcgttataggccgcctgcagcaccggtgccgtccgtcttggtgtcgtcggtcttgctgccgcaggcggccatgctcacgcacatgacggcggccagcagggcggtcgtcagccgccgtgtgatgttctttttcatggtgtggttcctcctgatgggtgtttttgaaaatttggctgcaaaaaagccgccctgtggatctgcgatccatagggcggctttgatgtcagtgcgtctccgtgggagaacatcctcatttcatcagcagcatttccgggcaccacaaatcactcttacttcatccgcataggtaaagtaaaagctaaatgcgtatgccttgtacagctgcttcatcatgtgtggcgttctcctttcccgaagttttctgtaagatatcacaacaacaacaagtcaccgtcaaccgtcatatccaccaaaaatatttgccgggaataaacactccgctacgcgctttcgcgctttaaagttcggatgtgcccggtgttcaagcaaatacccggcactttccgccgtcattttccgctggacatatcgcccagagcgccgccgtcctctgtcagcagcgtcaacccggcagggcgctccgccagcagatactccagcacaccgcggctgacgtcatccatctccccggcgcggcggatgtgcaccgccagcggctgccgcgccgccagaccggtgagccaccggataaacgcctgggccactgccgccggtgcggccgtgacctcaccctccgcgccggcacacaccgccgcagcgggctgtatagcccccagcacccgcagcagcgtccggtcgtccggccgcacgtcgttcccgacgacgtccagcagctttcccactgcgtccgccatccagaagcagggcaccgcccggaggcagtaggtccgcacgtgcaggcccggcgcatcggtccgcgccgccgcaggctcctccggcgcggcgggcgcggccttcagctccgcgtatttctgcgtgatggcgctgccgggatagatctccaggttggaggccagccggttgcggaactcgttgaaaaaccggatagcacggctgcggtcgccgccgcgctcatacagcgtcatcagccgcagggccaactgctcgttgtagggctcgtattccatgacccgttccagaatgcccacggcctccggcagcatatcccgctgctcatacagctccgccgccttcatcagcagccggttcttccgcttctcataatagatgcgctggctgaggatcagctcattcaggtcctcgcagtggttgaaatagtacccctccagcagctcgccgccgaaggcgtcacacgcccgcttcagctcgtccgccgaccgggtctccgggtcgatctcgtcgatggtctgcagatcgcagatatagtcgtatgcccggtcgatgcagcagtactcccggtccagcttgatgagcgaccgcccaccctcgccgatatcggtgctctttttgatcttccacagggtatagcgcagattatacttggcagcgctggcggcgctgtccggccagaggtaggccgccagcttctcccgcgcgtagtagtccccgccccgcaggaacaggatacacagcagggcgcatcccttgttgcccagctccggggtgatgtccgtgccgtcgcagatgacctgcggcttgccaaacagtctgatctgaagcatggccgtcacctcactgccggctgtgcagcaccgacccggacttgatggtcacggtcacgtcggtctgctccagctgctctgcgggcgcggcgcggatgtcgcggtccagcaccacgatatccgccaggtatcccggcgccagctttcccttgcgcttgtcctcaaacagcgcgtaagcgccgttgacggtgtacatctcgatggcctgctccacggacacggcgcaccggggcacggcgcggttcaccgccgcgtggatgcccagcatgggccgcggctccgtcacgtcactgtccgacccgccgcacaccaccgcgccggcggcgaacatggcggcaaagtcgttggagcgcagatagcgctcgcccatccggcgctcgtacataccgcccttgccgccccacaggtaggcgtaggccggctgcaccgagaagatcagcttcatgtccgccgcccgggcgatctgctccggcgtggccatgatggcgtgctcgatgcggtggcgcagggcggtgcttccgccctgacggatggccctctcgtgggccagcagcacggactcgatggcccggtcgccgatgctgtacagcgccagctgcatatcctgccggtagcactgctgcacgaactcgtccagtccatcctggggcaggaagatctgtccccggtagtccggccggtccgcgtagggtgccgacagggcggcgctgtggctggacagggtgccgtccaccataatattgccgcccacccggcgcagccccagcttccagaccttcgccaggtccatggtctgatagaacagcggcatatccaccgggaactcgccgctgtgggcgtagatgaactccgcgtcccggtcgtcgaacagccagccgccctcgatggccgccacggtggtgatgccgttttccagcagccgggacatggccagatggatggcctccatgcggaactcgtccggcaggctccgcagcacattggagcgcagcacatagttggcgttccgccggaaaatacccgtaggcaggccgctgccgtccagctccacgccctccagggagaagggcaccttgtaatacagcagggcgtgggtgttcagcatgctgacgtggtactccttggaaaacagcaccaccggactgtcgctgcaatacttgtccagcacataccggtccggaaaacgcttttcctcgaactgcgactcctccacctggcagcccagcaccgcgccctcccgcttttcggcggcggccagcatctcgcccagctcccggtgggaccgcgcacctcccagatccacgctcatcatgttcacagcggtctgcatcacatggaagtggttgtcgataaaccccggcagcaccgtgccgcccctggcgtcgatgacctgcgtgccggggcgcaccagcttctgccaatcatcgccgcggcctgcggcgcagatcattttccccgccgcggccacccaatcggccccgccgtcgccgcacatggtcatgcagcgcccgtttttgatgatgatatccgcgtacatagcgtcccgccctcctgttgaaagccgtgttgtgttatggccgtattgtacaccagggcgggccgtctgtccagtggcgctgtgtccccggcggcaaatgtaccaaatcgtttgttgaaaagcgcggcacaatttgctaaaatgtttagcaacaacggaaattcaacgcttttcccacgcgcggcgcaacatctcccggttacaatgacatcaaactgaggcggagcacggccggcgcgcgccctctccgccctcccgaaaaaacgaaaggacagggatgtatatgagcgttttgattttgaaccgcgagcaggtcaagcgggtcatctccatgaaggaagtcatccaggaggtgcgcgaggtctatcgtctgaaatcccagggcaagtccgtgatctggccgctggtcaactatgaattcgtggacgagcacgccgccatggacatccgttccggctatatcaagggcgtacagctccacggcctgaagatgctgaacaactttcccgagaaccgggaaaagggcctgccgcccttcaacggcattatgatggtctacgactccaacaccggtattcccgtcagcgtcatggacgcctcctacgtcacctgtatgcgtaccggcgccgccggcgcgctgggcgtggacctgctggcccgcaaggacgccaggcacctgttcatcctgggtgccggcaaacaggctcccttccagatcgccgccacgctgctgctgcgtccggccatcgataaggtctacattgccgaccccatgttccccgacaacgcggtgcagttcgccgcccacattgcccagcagctctccgatgacttcggcatcgacgcctccggcgtggagttcctgccggcgctggatatggccgccgccgtgggcgacagtgatgccatcatcaccgtcacgccctcccgcaagcccatcatccagaaggcgtggctgaagcccggcacccatctgagctgcctgggctccgacatggaatccaagcaggagatcgagagcaccatcttccagggcgccgccttctacgccgacgaccgcgcccagtgcatccgcgtgggcgagatggagctgcccatcaagcagggcgtcatcagtgccgacgacatcaccggcgagatcggtgacctcatcgacggcaaggtccccggccgcaccagcgacacgcagaccaccatcttcgacgccaccggcctgtacattctggatctggccgccgccaaggtagccatcgaccgcgcactggccgagggcgtgggcttgcaggccgacctgtaaccccgcggaatatatccgcttaccctacaaaacagacgaaatgaggaggacaataaaatgaaactggcatggtttggtgtggaagagtggctgaatcccatggactctctcgcccgtatcaatctgggcagcagctgcgtcagcgcccttcgtatggacgagctgtttgacctgaccggcgaggatctggacgctttcctgaacgaaatgcgtaccatgagcctgcattatcaccacggcgacgccaccggctccccccggatcaaggcggcggtggccggcatttaccccaagggcaacgtgaagcccgaggaagtgatgatcacccacggcggcaccggcgccaatgacctggtgctgatgagcgtgctggagccgggtgacaactgcgtggtgatcaagccctcctatcagcagcactacgatatccccaagggcagcggcatcgagacccgcgtggtccagctgaaggccgaggataactatcagctggatttcgacgccctggacaaggcctgcgacgccaacaccaagatgatcgtcctgaccaaccccaacaaccccatcggcgtgaccctgtacgacgagggcctgcgtaaggtcgtggacatcgccgccaagcacgacgcctggatcctctgcgacgaggtctatcgcgggctggacgagaactatatgccctccattctggactacggctaccacaaggccatctccatcagcagtatgtccaagatgtactccatggccggcacccgtatcggctggatcgtctgccgcgaccacgagatgtacgaggtcatgaagacccgccgttcctacaacaccatctgctgcggcatctgggacgagatcatcgcctccatcgcgctggagcattaccaggccctgtgggcccgcgcccgttccattctggagcccaaccgcaagatcgtggaggactgggtggcctcccagccccacctgcacctgcgtgccaaggccatgggcaccacctgcctgatcgactatgattacgacgtggactccgagaccctggccaaggacgccatggccaccgagcagatcctggtggtccccggcgactacttcgatatgcccaagaccatccgcgtgggctacggcgccttccgcgatccccaggtgctgaaggccggcctggaggagttcggcaagtacctggagaagtacaactaactgacacatccctctctcacaaatttcttcccccctgcggcacgcgccgcaaaacaagcgcccggcttctgccgggcgcttgttttttcgtattccgttggcgctcacacccgcgcccagcgcatccggccgtctccgaagacagccgtcagccgccccgtgtccttcagccacgccagataggaccgcaccgtgctgcccaccagcacatactgctcaaagctcatggtcagcccgtaggcggcaaacagctgctgcaggatgtcctcaaagccgcggggcgcggcgcagaggtccacgatcctctccgcgatctcatgcacctttcggatattgtactgtgccaggtcggcgatgtcctccgtcacctccgtgtgcgcgggcacaaataccttcgccgtcatggcctgcacctgctccagcgttttcaggtacccggccacgtcgtaaataaagccgatctggtacttgtccagtatctcccggctggacaggcagtccgccagaaacaccacgtcgtccggcgtccgaaagcctaccatgtcgaaaaagtgcccgggcagggggatagacgcaaagccctccggcagcttgtccgccgtcagctccgccgcgtcgctctcctgtgccagcagaaacttgtgccgcaggtccttgggcggatatccgccgtagagaaacgacggctccagcaccgggtgccgggtaaacgcgcagtcgattcccggcgcgtagatcctgcagcccgtctgtccctgcaaataccggttcccgccgatgtggtcggcgttggcgtgggtgttgtagatcgccgtcagctgccagccattggcgtccagcacctgccgtatcctccgccccgcgtccttgtcgttgccgctgtcgatcaggcagacgtttttctcatccagccggaagagaccgatgttggtggggctcttgatgtaatacgtcctctcggtaagctgtatcagttcgtacatagcggtatcccctccgttacttttttgtatcgccatccgatcatgttttgttgcttccttgtcctgtcatcctatcagtttttccgcctctttgtaatgtcattctatcatgttttgctgtttctttgtgctgtcatcctatcatattcccccgcttctttgtattgtcatcctatcatatttccctgcttctttgtattgtcatcctatcatattttcccgcaaaacacaagcgcccggctgatagccgggcgcctgcgtacctcatctgtatatggcgccgctggccgccacacagttctttccgttgtttttgcagatatacagctgcctgtccgcctttgcgataagtgaaaagtccttcaattccaggcctgtcccgcacgcaacaccgaaagaggccgtaacaatgtgcctgtccggcaggtcctcccttggaacagccacggcgcgcaccgcgtcaagaagcgcaccggcgatacggcgggcctcctcctcaccgatatccggcaggatcgccacgaactcctcgcctccaaagcggaagagataccggtcggccgccgccaacaccccgaccacgcttccggccacacgccgcagcgcttcgtcgcccttcatgtgggagtagttgtcgttgtacgatttgaaatcatccacgtcaaaaataatgacgctgacccgttccggcgcggttttatcggcaatgaacgtgccatacgtctccatcgcctttttattcagtgtttccgtcatcacgtcgttgtaggccagcttgatgaaagcgtgacccatctccttgatgtgccgttcgttggcggactgccgaaggaagatggaccgcagcacgataaaacctacaatgatggaaaatcgcagcaggaaatgcttgaacagatcatagttctccgcgtagggaagctgcccgggcagccaccagctgatcaatatcagaacacataccgccacggtatccacacggcggtatgtgggcgcgatcatgatcgcaaacagatagcacatggagatggacaacccgacccggtgaaagttgcaggagaccataaagacggtaacgctggcgatcaccaccccatagtaggccagcagcgcaaaccgcgccggcggcgcatcgtattctcctccacgctttttataggcgatcgtaaacaccagcatcgccagcgagccgccgatcatcatgtaaagcggcaccatgtcaatggggatcatcgagcgcgccgcgatgttcttgaccaggtagatcccgttggtcagtataaacagaatggctgcataaaatacgaccgaaaaattctgccgcataaggatgctctccacagtcggaatctcatcgatctgtattcccagcacacgatcactaaagctcttaaacctggcaaacgccatatccgatatccagcaggacaccctctgcacaatatcgaccttattccctcgtctttccatacgatccctccagcaaataatacgaccccgtttgtctgcttttgttgatctattgttatattttaccatgcttccgcccaaaacacaagcgcccggctgatagccgggcgcttggtattatgcgggaaatcgagcccttacttggcgtccttgatggcggcctgtgcggcggccagacgggcgatgggcacgcggaaggggctgcaggacacatagtccagacccacgcggtggcagaactccacgctggaggggtcgccgccgtgctcgccgcagatgcccagatggatgtcggggcgggtggcgcggcccagcttgcaggccatatccaccagcttgcccacaccgacctgatccagccgggcgaacggatcgctctcatagatcttattgtcgtagtaagcgggcaggaacttgccggcatcgtcacggctgaagccaaaggtcatctgagtcaggtcgttggtaccgaaggagaagaactccgcctcggtggcgatggcatcagcggtcagcgcagcgcgggggatctcgatcatggtgcccaccaggtacttcatgttcataccggcagcagccagctcctcgtcagcggtcttgaccaccacgtccttgacgaacttcagctccttgacctcgcccaccaggggaatcatgatctcaggcaccatgttccagtcggggtgcttcttctggacgttgatggcggcgcggatgacggcacgggtctgcatgacggcgatctccgggaaggtgacggccagacggcagccgcggtgacccatcatggggttgaactcgtgcagggaggcgatgatggccttgatgtcggctacggtcttgcccatatccttggccagcagctcgatgtccgcctcctcggtgggaacgaactcgtgcagggggggatccaggaagcggatggtgacggggcagccctccatggcctcgtagatgccctcaaagtcgccctgctgcatgggcagcagcttggccagagccttctcgcgctgctccttggtgtcggagcagatcatctcgcggatggcggcaatacggtcgccgtcgaagaacatatgctcagtgcggcacaggccgataccctgggcgcccagagagcgggcgcgggcggcgtcggcgggagtgtcggcattggtgcggaccttcagccggcggaacttgtcggcccaggccatgatgcggccgaaatcgccgcccacattggcgtccacggtgggcatagcgccgtcgtagatgctgccggtggagccgtccaggctcatccagtcgccctcgtggtaggtcttgccggccagggtaaactgcttgttggcctcgtccatgttgatggcgccgcagccggagacgcagcacttgcccatgccgcgcgccaccacagccgcgtgggaggtcataccgccgcggacggtcaggatgccctgagcggccttcatgccctcgatgtcctcgggagaggtctccagacgaaccaggaccaccttctcgccccgggcagcccactccttggcgtcctcggcgttgaacacgatcttgccgcaggcagcgccgggggaggcgggcagcgccttgcccaccggctcggtggccttcaacgccttggggtcgaactggggatgcagcagggtatccaggttgcgggggtcgatcatcgccacggcctgctgctcggagatcatgccctcgtccaccaggtcgcaggcgatcttcagagcggcgggagcggtgcgcttgccgttgcggcactgcagcatgtacagcttgccgtgctccacggtgaactccatatcctgcatatcgcgatagtggtcctccaggatattgcagaccttcacgaactcgtcataggcctcggggaacttctcagccatctcggcaatgggcatgggggtacgcacaccggccaccacgtcctcgccctgggcattggtcaggaactcgcccatcagcttcttctcgccggtggcggggtcacgggtgaacgccacgccggtgccgcagtcgtcgcccatgttgccgaaggccatggactgcacgttgacggcggtgccccaggaataggggatgtcgttgtcgcggcggtacacgttggcgcgggggttgtcccagctgcggaacacggccttgatggcgccgatcagctgctccttgggatcggtggggaagtcgctgccgatcttggacttgtactcggccttgaactgcatggccagctccttcagatcctcggcggacagctccacgtcctgggtcacgcccttcttctccttcatggcatcgatcagctgctcaaagtacttcttgccaacctccatgaccacatcggaatacatctggataaagcggcgatagcaatcccacgcccagcgggggttgttggacttcttggcgatcacgtccaccacgtcctcattcagacccaggttcagaatggtgtccatcatgccgggcatggaggcgcgggcgccggagcgcacggataccagcaggggattttccagatcgccgaacttcttgccggtgatcttctccatcttctcgatatactccatgatctccgccatgatctcgccgttgatctggcggccgtcctcgtaatactgagtgcaggcctcggtggtgatggtaaagccctggggcacgggcagaccgatattggtcatctccgccaggttcgcacccttgccgcccaacagctcacgcatcttggcgttgccttcggtgaacaggtaacaatacttcttgctcattgcagttcctccgtatattaaatagttgtaccaaacattgagaacaatttattatagtcatatttttttttaaaagcaaccctgtcgcggatatttttacaaaaaaatgttgtttcctctgcggacactcgccgtaaaccgataacacatttccgtttcctctattttccgtcctttttggcgcagcacccgcaaagccgccgtcctggcgcgcttctcccggcggaacggagggaagattttgtgtcttgcctattcccccactcctgtggtatactattatattgaattagtaggcactttaccgggaggtatgcgcatggtccagctgccccaggaaaacagcatatttgcccgcaccgtgcgccgcgccgccggggaggaccgtctcagccacgcggtcatcctgacgggccggggtgacctgaccgccgctgcccgatttctcgccgccgcccacgtctgcgaggggacggacaggccctgcctgcgctgccgccactgccgcaaggtactggagggtatccacccggacgtgatccccgtgctggatacagagcacaaggagctgacggtggaggcagtccgcgccctgcgtaaggatgtgtacatccgccccaacgaggcccggcgcaaggtatacgtcatctctgactgccgccagctgaaccagcgggatcaggatgtcctgctgaaggtggtggaggagggaccgccctatgccgctttcatcttctgcgccgacgctcccgccgccctgctggagaccgtccgttcccgctgtactctgctgaaatacgacggggaagacgcgcccctcagcgacggtaccgcggagctgtgccgtgcgtttgcctccgggcgtctgctgccggtgaccacggcgctgctctcccgcgagcagtccctgaagcgcgagacgctgcaggcccagctggaggagttgtggcgcgccgcggccgaagccctgctggtgcagcagggcaaagcgcggccagatccctcctgtgcggaggcagcccttctgctggcggacaggctgacggcgcggcagctgctgggactgtgcgcggccagtcagcgctttgccgaacaatgtgaccaaaatgcgggcgtgggccagatattgggcgccctcgccgtgaaatgggaggaacttttatgaccgatgtgatctctgtccgcttccgcagcggctgcaaggaatactacttcgaccccaaggggctcacgatccccgccggcaccgacgtgatcgtggagaccgcccagggcccggaattcgcccactgcgcggcgggcaaccaccaggtgcccgatgacgcggtggtcaagcccctgcggtccgtcctccgcatcgccaccgacaacgacaagcacaccgccgcctacaaccgcagccgtgagaaggaagccttcgacgtctgcaaaaagaagatccagcagcacaagctggagatgaagctggtgcgggtggagtgcagctttgacggcagcaagatcctgtttttctttaccgccgacggccgcgtggacttccgcgagctggtcaaggacctggccggtgtgttccgcgcccgcatcgagctgcggcagatcggcgtccgcgacgaggccaagatgatcggcggtctgggcatctgcggccggcccttctgctgcgcccagttcatggacgagttcctgcccgtgtccatcaagatggccaagacccagaacctgagtctgaaccccaccaagatctccggtacctgcggccggctgatgtgctgcctgaaatatgaacaggacgcctatgaggatgccgttaagcgcctgcccaagaacgactcctttgttctgacgccggacggcaccggcaacgtcagcgacgtaaacgtgctgaaggagactgtgaacgtccgcctggatgaccgcaccgacggtccccgctgctatcacaactgcgaggtctgcgtcctgcggagcggcaagggcagccgcgacggcatcgcggtccccgacaagcgccccgagcgctatgtggaaccgctggccgaggaggagctgccctccatcaccctgctcagcgatttcgacccggacgccgcggcggagagcgaaaagaagcgcagccgccgcagccgcagccgccgtcggagcgacggcgagaagcgcccggcagaaaagcccgccgcccctgcggaaaaagcccctcgttccgatgcccccgccgaaggcggaaagccccgccgcgagggcggtgatcgccgccgcagaagcggacgccgcggcggaaacggcggtgccaacgccgccggcagcaccggcgcacccgcacccaaggcagtcaagcccgccggggacggccagggtaccgtgagcggtgagaagaagcgcagccgccatcggccccgccgcagaagcggcggcagtaagcccaacggcggcacggaggcgtaaatcatgcgtaaattcaacggcttgctgctggtcagcgatttcgacaacacccttgtctacaccgaggaggccctgcaaaagtgcgtggatatgccccccgtctctgacgagaaccgcgccgccatcgagtatttcatggccaacggcggcatcttttccgtggccaccggccgcgccaagcccgcctttgaaacggttgtggacggcattcccatgaacggtcccaccgtgctgttcaacggcgcagctatctacgacttcccgcagaagaagtacctggtcacggcctttctgcccgactccgtccgggagcacgtcacggaggtcgtcaccgccctgccccaggtggctgtggagctgtaccacgatgacaacaccatccacgccctgaacgccaacgacgtcacccgccgtcatatgcacatcacccacgcgccgtccatcgaggtagacaccatggacgacgtgccgtcccccatcagtaaggcccttttctccaccgaggaggcgcacctgcccgccctgttggactttctggcctcccggccctggtaccacgactatgaggtagtccccagcgccgtgaccctggtggagctgacagccaagggcgccaacaagggcggcatggtccggcgtctggcggacctgctgggtgtgacacgggaaaacgtgatctgcgtgggcgaccacgccaacgacatcagtatgctcacctgggccggccagggctacgcccccgccaacgccattccccaggtgctgcacacacccggcgtccgccgcctgcccgactgccgcgacaacgccattgcccagctgatccgttctctggacaagcagctttgaaaaagaaaaaatccaagccccctttcggggcttggatttttattttatcaggaacaatacagaccgcgtttgaccgccccggccactgtcccgtcgcttttcatcaaaaagttttttccgaaaacccgccgtttccccccattaaagcccctttttataaggttttctcttcacagcaaggtttgtttacaatttaatccttgacgtgaggggaaaatcattgtatcatacgctttgtaactatttgtaacttttaggggcttacaccatgacgcaggatcaacaacagaaaaaagccgccggccgcgaccccaaccgggagcacatgaccctatcggagctgtggcagctgtggcgtgacaatttaatgagctggcggagcttctgcgatgagcaccacgatctgttcaccctgaacatacaagcgggcttccgccgcatcggtcggtggctgtccgatctgcgcagcaatgcgcgggctctggcggccgccaaccgcgacaggcggttccccgaatccgaatacggcgcagcccagctgttcctcttcttccgcggcagcctggagcgccgggccgccgccatacgcgagggcttctccaaccggcgcaaggcactgacctggatgggcggcaaacgccgccacttttttgagaagatgcatctgcacccggtggcattcctgtgcggcgccatggccatcgccgccgcggccaccgttctgtccctgtacaccctgggcgctcaggtgacctatgacggtcaggaccttggcatcgtctcctcccgccgcgccgccgaaaaggtggtggcggagctggaggatgtcacccgcacggctaccggcgacagcggctacaccgtggatacggcgctgctcaccgccgaaacaggcgttttcccccgccgcgagctgatctccgacgacgagtttgaagagacactgagcgacaccctcggcgtggtggattacgcctatgtcctgtatgtggacggcgaaaaggtggtggccaccacccgctccggcgcgctggaggacctgctggagcagctgaagctgggctatgagacggcggacacggtgaacgcctacttcgtggaggaagtggacatccggcaggagtacgtggagtcgtcctacgtgatgaacctgggctacatcgccgagatcctcaacgagacgaaggagggcgaggtgacgtacaccgtcacttccggcgacagctattacagcatcgcggagaaatacgacctgaacgtggaagcgctgatgaagctgaaccccggctatgacccgaaaatcctgcgggtgggcgatgtgctgaccatcagcaacgccgtgccctatctgacggtggtgaacgtggagcggcagcggtacgtgcaggatgtgccgtaccaggtggagtacaccgacgacagctccatgtatcagggtgagtataaggtcacgtcccccggcgtgtacggcaaggcggacatgaccgccaacgtgacgtacatcaacggcgaggagacggagcgcgaggtggtggccagcgtgacgctgtcccagccggtgacggagcagcagctccgcggcacgaaggagcggcccacctggtatcccaccgggtcgttctcctggccctgcaccggcatcctcaccagccggttcggctatcgaagcctgctgggcagcacctaccacagcggcatcgacatcggcaacagctacggcacgtccatctacgcctccgacggcggcacggtgacgtactccggctggatgagcgggtacggctatctgatcatcatcgaccacggcaacgggtaccagacgtactacgggcataacagcagtttggtggcgtccctggggcagaaggtccacaagggccagctcatcgcccgcatgggctcgacgggccgctccaccggcaaccactgccacttcggcatcaagctcaacggcacgttcctcaacccgctgaactatctgtaaaccgcagcgcccctgcccatcggcgggggcgccgatctttccctgcggcagggcgcacgtttccggggttgcaaaacccaaaaactatggtacaatagacctgcgcctgtatgtatttccccgccggcggcggtggaatggagaaaccgttaaaatgaggtgaaaaagatgaaaaaactgatcgcgctgctgtgcgcggtgtgcgccgcggccatgagcctgtgcgtcgcctgtgccagccccctcaccggcgacaccagcaacatgggcctgtggatcaccctggtggtcgtggccgtcatcgccgttgtagtgctgctcatcgtgggcaaaaagaagaaaaaataaacagcgtgcagaccgccccgggccaatggcccggggcggtttttatgctgctggccctggccatagacctaagtctggctgcctgcggcgaataacccgccggcgctaacggtatgctctttttcggcgcatgatccagacccacaaaaaagagacggcctcggccgtctctttttatgccttttattcaaacaaccccgcctgtcccggcacctccgtatgcccgatggactgtatctggcggacattttcggcggtcagcgcgtcgctgatggccatcttacggatgatgttctgcaccgtcacgtccagccccgtgccctccctgtagtcggcagggaagatgaaatccacccgtcccttggccagcaggtcctccacgccggcccggttgctgctctggtacacggcgatggcctgcccgccgtaggaccgcatcatcttcatacacggcacgtcggaaagcccgtcgcccacatagatcatgttggtaaagggcacccgcttgctgtcgtcgggcatggagtcgttcagcgtcttgtcatcggccacgtccagcacacccttgttgatgcggtagacgaactgggtcttgttggtgaagttgacgtccagcttgggccagcaggcggcacccgcctcgtcatagtagaactcgcaggcgtagatctgcttgaactcgtgggcaataccgctgccctcaatgatctccttcagcccggaggacagcacatagtgctcaatggtcacgccctgctgctcaccgaaggcgttgatccgctgaaaccactcccgcacgccgggaaacagctccatgctgcggccgcacgccaccagaaagtcccgcttcaggtccttgccctgggcgcggcactcgacgatcatggtgtacatatacgccagcagcccgtccatccggttctcccggccgaaggtgttggccttgtgccagaactccgccggggtgtatcccagggccgggatgaaggcgtagtcctccatatccgtagtacacagcgtcttgtcaaagtcgtacagcagcgcgatgatgggctttgtcataccgtcttcctccgtggaaaaaaggcggcgcaaggccgccttttgttgttgtgcttacttgtctccgctgtaattccgaccgaacttcagctcgtccagactcagccggaaatcgctggggatggcgctgccgtccaccggcggcagcttgatggtgggctcgtcggtgacggcgctcccggcgcccttctcctccggcgcgtcgatgtacttgctgaggatatcctgctcgatggcggacaccacatcggcctggggcgcggcagcagggacctccggctgctccggcacaaagtccagctccggcagagactgcaaaaaggcgctctgggcctggcacagctcctcgctgcggcgaatgaacgccgcggtcttctcctgtgcggcctgcagcttcttctccgccgccctgcgctcatcgtccagccggtggatctccgcctgggcctccacctgcgcgtcggccaggatcttctccttctcgctctgggcctcctgcaccagcttggcggccatcttctgggccgtcagcagtgcctggcgcatggcctcctcggtggaacggtactcctccaccttctcggccagcaccttcagcttggccttcagcgtgacattctccttgaacagggcggtgtagtcctccgtcagcgcgtccagaaactcatccacagacgccatattgtatccgccgccgccgaatgacgccttcgggaatactttttcggaaacttcctggggtgtaaacattgccgatccctccgttatatgatttctttagaagtacaatccgttgttctccagctcatcgatcaggtcgcccatgatatccacggagtagggggtgatgatgtacgtattggccgccaccttcttgatcttgccctcgccggcataggctacgccggacaggaaatcgatcagccgccgggccacgtccttgttggtggactccaggttcagcaccaccgtgcgcttctccttcagatggtccgcgatctccgaggcgttctcgaagcgctccggcttcaccagcaccaccttcagctgggtggtggcgtggatgttcaccaccttgttgtggcggtcctcgctgcggcgatcctcacggcggtcgtccttgcggtcgtcaaacagggaacgggaggactcctttaccggctcctcaaaatcgtcctcataatcataatcctcatcatcgtagggatgaatgatcttcttcagctcgtccatcaggcccatgtgcaatacctcccgcgtattatttggaatagtctcttgcgccgaaaatggcggtgcccacgcggaccatgttggcccccgcgcgaatggcatcggcaaaatcgccgctcatacccatagaaagatattctaatccattatcgtacatttttctgtttatgtcaacatatagtgcctgtactttttgaaaatataccacattttcttcccgtgtggcgtccgccggggggatggtcatcagtccccgcacccgcacatggcccatttccttcgcctgtgccgccgcgttttccacctcctgcggcgcaaagccgcttttggccgcctcgccgccgatgttcacctccagcaggatatcctgcacgatgcccagcttttccgcctgcttgtccacctcggccaacagctccggcgagccgatggactggatcagggccaccttgcccaccacctgcttcaccttgttgcgctgcaagtggccaatgaaatgcagcggcgcgccgcgataggcatcctccgccagctttgcggtcatctcctgcacccggttctcgcccagggcgtcgatgccggcggcgatggcctcctggcaggcggcggcatcgttcatcttgctggcgcccaccagcgtgatatccgccccggtgcggcccgtctcccgtgccgccgcgtcgatctcggcgcggatcgcttccaaattttcccgaatagacatcgcttgtgcctccttgtctctttcgtatctaagccgcgtgcgcccgctggaggcgggtgccgccgtgtttatcggatgaccttgccgtcatacagctcgccggacgtggcgatgacctgatcgccggagcgcagggtctgtgtgtcccgcacgccctcggcgggcttcaccagcgcgtagccctccccctgatataccagctcgatcggccggaaggaggcgttctcgccgtccacacagtacacgccggtggtgccgtccgcgctgacccgcagcgcgtcggccggtacccgcagtccctgataggtgtgcagcaccgcgtccgccgcctgatgacgcagcagcgtggtctgtgccagataccgtgtgctggacagcaccaccgccgcctggccgttctcctcccgggacacggacaccacgctcatgcggatgctctggtcaaagcccttggccagacgcacatccacccggcccatatccttcagcgccgccgcctgctccgccggcagcaccaccgcatagtaccaggtgtcgccgtagatcagcttgcccacgttgctctgctccgccgccgccttcacgccgttcagcttgcccggcgtcacgtcctccagaaacgcctccgtcagtacgctctcgtacccgtcgcacacggcggaataggtgccggagaccttggcggtcacggtcttcgcgccggacagcgcggctttctgctgctgtatctcgctttccaccgacttgatctgcgcctgtatctcctcctgtgacgtatagctcccgtggtcccgcttcagcacggcggccttcagcgccgccaggtcgctctccgccgcggcatagtccccggcgctcagcgtctgccgcagggccaggatgtcgccggtgatggacgtatccagtttcagcgccgcatccgggtccagataggacgtcagggcgaactgcagctgctgcagctgcaattccagcgtctcgatccggctgacggtctgcaaagcgctgtcgtcgctgtacaccgtggccaccgtctcgccggcggccacccgctgtccctcctgcacagcccgggacacggtgccggtctggccgggcagcggctcctccgtccgcaccagccagccctccatggagataacgtcctccgcctgtgcctcatagaccagcgtgatggtcatcgggtcggcaaagtagttgtatacctgcgcggcgaagtacaccagcaccgccgccagcaccgcgataggcagcaccttcaaaagcggcgacgagcgcttgttgttccccgccgggatgtttgtgttattgtctggggtgttgttcatgggcttccctctttgtctatgttctcttactccgcgtcctcccacagcgtgacattccgcgccggcgcgatggtggagatggcgtgcttgtagatcacctgctgccgcccctcgctgtccagcaccaccacgaagcagtcgaaccccgtgatgacgccccgcagctgaaagccgttcaccaggaacagtgtcaccggcacgttctccttccgggccttggtaagaaagatatcctgtaagttgtttgtcttctgcatgatcgtccactccttgtatgtctgtacggacgatatgcacaatatctgcctccgcccgccgctatcagcataccccggcggacaggaggaattctgtcgcattttgtaaccccgccgaaaaatccggcgttttttcccataatatccagtggatggcctcgttgcgccgcagccaggtcagctgccgcttggcgtactgccgtgaccgcagcttcacctcctcgatggcctcggccgtggtggcgcggccctcggccaccgccagaaactgcttgtacccgatggcctgcagggccgtggcgttccggggcaggccgctttgcagcagtgtctccacctcccgcagcagcccctgcgccaccatcgcgtccacccgccggtcgatgcgctccttcatatcctcccggtcccggaaggccaggccgatgtacgccgcgtcgtaccggggcggtgcctcccggctttttctgtcgtgcgccccgatagtctcccccgtctcgtaatagacctccagcgcccggacgatccgcttttcgtcccgcaggtgcagccgcgccgcgctctccgggtccacggcccgcagcgcctccagcagcgcctccgcgccatccttcgccagcttttcctgcaattcccggcgtatctccccgccctggctgccggcggcaaagtcctgcccccgcaccagcgcgtccagatacagccccgtgccccccaccagcaccggccgctttccccgccgcaggatgtcctgcacacacgcgtccgcctcccggacgtaccgggccacggaccagctctccgccgggtccgccacggccaccatgtggtggggcacgccctccatctcctccgccgtgggggcggcggtgccgatggtcatgccccggtatatctgcatggagtccacggacaccacctcgccgccgaagcgcttggccagcgccacacccatcttcgtcttgccgcaggccgtgggccccaccacgcagacgaccttgttgtccatgtcctcacctcgatccgttttggaaagcgccgcagcgccgttatggcctgtaaagtcgtggatttttcgttctgccgatgacgggacggtgccgctgtactttgtgtacagcaagccgacccggcgatggcagaacggaagagacgcggctttacgcccgtttgaacattttttcgatctcgtattccctcagcttcaccgccacgggccgcccgtgggggcagtagcgcaccgcgccggactgcacctgcgccgccagcgcccgcagctccgccggatcgctggtcataccggccttgatggcgctcttgcaggccacggtgtgcagcacctcgtcccgcagggccgcccggtccgcgctgtgcaggcgcagcttctgcgccaactcctccagcgtggcggcggcgtcctcggcccgcacatcgtcgggcacctcccgcaccagcaccgtgccgtcgccgaagtcctcgcacaagaacccgcagtccgccagcagctccagattttccagcacggcggtgtattcctccgccgccagcgtcaccgccgccggcgtcagcagcagctgccgcatgggcggctccgtgcgcgccttcagcgcgtcgaaccgcattctctcgtgggcggcgtgcttgtcaatgagccacacgttccgttccgcgtcctcgcagatgatatacgtcttcagcacctcgcccgccacgcgccagggctgctccgccgcggcggggccctccggcatggcgatctcctgctgctccggctccgcggccggggcaggggagggcgtcgtctccggtcgttccgccgtttcctccgccggtgtgcggacctccggcggtgtgatgtgatacaccacgcccggcgcggccggtgccgtgaacggcttgtccggccggcacaccacgtcgtgcaccgccatcaccggcgtgaccggggcgggagcgggcgcgggtctgaccggctccgtagccgccggtcttgcgggtgccgagccgatggccttccccgcgggcagcgtcaccgcctgcgaaggctttggcgcgttcggccgtttcaggaattcctgtgccgtcatggtctgatagaagggcttttccgccgcttttggccgcccctcgccgtccagcgcgtctttcacggtgtagtgcaccgcgtcgaacaccgctttctcggcggcgaatttcaccaccgtcttggccgggtggacgttcacgtccacctcgttcaccggcagcgtgatgtgcagcacacagccggggaacttccctttcagcagccggttgcggtaggcctcctccacggcggcggtcagcagctggctttttaccagccgcccgttgacaaagaacagctgccgcgcccgggtaccgtgtcccgcggcgggactgctcacaaagccgctggcccgcacatcgccgctgccgccgtccacctccagcagacttttggcaaaatcccggcccagggcagcgtagatcgccgacagcagctgcccgtcgccgggggtgtgcagcacctcctgcccatcccgcagcagcttgaaggacacctccgggtggctgagcgccagctgtgtcaccacagcggcagccgccgcgccctcggcactgtcctttttcatgaatttcattcgcgccggggtgttgtaaaacaggtcccgcacacacacggtggtgccctccgggcacccggcggccgtgacctcaccgggtacgccgccctccagatgcagggacgcgccgctgtcggcgccccgcgcacgggagaaaatatccagccgtgacacggcggcgatggccgccagcgcctcgccccggaagcccagcgtcccgatagccgccaggtcctccgcccggcgcagcttgctggtggcgtggcgcagaaacgcggtaggcagctgctccggcgcgatgccgcagccgttgtccgtcacccgcagatacgtcatgccgccgtgctccagctccacggatacggcggacgccccggcgtccaaagcgttctccagcagctccttgcacacgctggcggggcgctccaccacctcgccggcagcgatgagatcggcaatatgggcaggcagttgttgtatctgcggcatggtattcactccttttctattgcagcttgctcttcagttcatacagcaggttcagcgcctccagggggctcagcgcgtctacctgcgtccggcggatgatatccgccacggcgccctcggccatgccctccagggatacctggtcctcccgcgccgccggggtgtggggctgccggggctggctctccagctcccgcaggatctcccgcgcccgcttgagcaccgtgtccggcaggcccgccagcttggccacctcgatgccgtagctccggtccgcgccgccggggacgatcttccgcagaaagacgatatcctcgccccgggcgtggacggccacgttgtagttccgcacgttgggcagctcctgctccagcgtggtcagctcatgataatgggtagcgaacagcgtcttggccttcagcttcccggcgcagtgctccagcaccgcccgggcaatggacattccgtcgaatgtagacgtaccccggccgatctcatccagaatgagcaggctgttcttcgtggcgcagcgaagcagctccgacacctcggtcatctccaccatgaaggtggactgtcccgccgccaggtcatcgctggcgccgatgcgggtgaaaatgcggtccaccacgccgatatgcgcccgctgggcggggacaaagcaccccacctgggccatcagcacgatcagtgccacctgacgcatataggtggacttaccggccatgttgggaccggtgatgatggccacccggtcctcctttgcgcccatgtgggtgtcgttgggcacaaagaatgcgtcgccccgcaccttttccaccaccggatggcgtcccgccgtgatctcgatgaccccggactcgtccacctccggccgacagtagtggttctgggccgctacctcggcaaaggcgcacagcgtgtccagctgcgcgatcagcgatgccgccagctgcacccgcgtcacctgtcccgccgcctctgtccgcagcgcggcgaacaggtcgtattccagtgccgcgtcccggtcatgggcggtgagcacctcatgctccaggtccttcagctcctgggtgatatagcgctcgccgttcaccagcgtctgcttgcgtatgtagtccgccggcacctggtccttaaaggagttgctcacctcgatatagtatccgaacaccttgttgtaccccaccttcagggtacggatgccggtcttctccttctcacgagcctccagctgcgcgataaaccccttgccgccggagagtatcccccgcagccggtccacctcatcgtcatagccctcgcggatcatgccgccctcccggacggagaacggcggctcgtccaccagcacggcggcaatgcgcccgctgatgtcctccagcgtctccagctgctcgtccagctttcccagcgcccctgtccggaacggcgtcaggcaccgcttgatctccggcaggtgctccagcgccgcccgcaggttcaccaggtccctggctccggcggtgccgtagacgatccggctcatcagccgttccatgtcgcccatgccggtcagggccagccgcagctcctggcggcccacggtgttgtccgtcagcgccgccacggcattcagccgccggtcgatggccgccacgttcagcagcggctgctgcagccacatccgcaggttccgcgcgcccatgggcgtcttggtcttatccagcacccacagcaggctgcccttcttctccttgccccgcagcgtctccgtcagctccagattgcgccgggccgtcaggtccagctccatgaactgtcccgtccggtaccactccagcttatccagctgcttcacgtcggtcttctgcgtctcgtagagatacgtcagcagtccgcccagcgccagcagcggtgcactctcattccggggcaggtcccgcagcgccgcctcgccgaattgcagccgcaccttcttctccgcgtccgacacgtcgaaccgcccctccgccagcctctcccgccggcaggaaaagcgctcctccagcgcggcggtcagcgccgggtcgtcataggccgcggcgttcatcaccgcctccgccggggcgaagcgccccagctcgttgatcagccccgtcaaccgctgcgccccggtgaacgccgtcacctgggcctgcccggtggagatgtccgccgcgcacagtcccgccgccgtgtctgtcagatacacgccgcacagatagttgctgcgccccgcgtccaggcatgcctcgtccagcaccgtgccgggggtgacggtacggatgatctcccgcttcaccagccccttggccagagccgggtcctccatctgctcgcagatggacaccttgtaccccttggcgatcagccgcgcgatatacccctcggcggagtgatacggcacgccgcacatggggatgcgctcctcgtcggacttgctcttgtccttgtccctggtggtcagggccaggtccagctccctcgacgccgtccgggcatccggcccgaacatctcgtaaaaatcacccagccggaaaaacagcagggagtcggggtgcttctccttctcctccatatactgccgcatcatgggtgtcagctcagccatagctcggctcctttctccctccggaaagtctgcgccttacggcgcggggcgctcagtccaaaaagcccagcaggcccagaattccgaaggtggtgtacatcaggcacatgaccaccagcagaatggtgatgatgctgtacatggcgctggttttcttcgtgtgcttgtacttgcggatatagaacagcgtgccgcaggtgatgcccagcgtcagggaggacaggtgggtcattaccgcgctgtccttgaaggctgtcaggcgcaggatcaggatcaccagcaccacggcaaactccgcgatcagcgtcacattcagccaggtgggcagcttcaccttctcctgctggttcaccttctcggccaccttctgggccatgtacgcgccggtggtgtacccgccgtagttgctgttcttcttcttggaatggatattcttattggggttgcccttggccttgcggatggcctcctcctggttggcgtactggttcacgttggccttgtagctgttctttgccatggttttattctccttctatcggtagattggtaagataacgccgcagcatatcaaaagcgtggtgggcagacagcgtccggatgcgctcccggtcgccgcccaatgtcagatgccgcacggtcacgccctccggcgcggaaagccccacgaacacggtgcccaccgggtttccccggtcgtccccgtcgggaccggccagtccggtgacggacaccgccaggtccgcgcctgtcagcacccggacgcccagggccatggcccgggccacctctgccgacaccgcgccgcagcgcgccagcaaattctccggcacgtgcagcacctgctgcttcacatggttcgtatagctgactacgccgcccagaaagacctgcgacgcgccggggatatccgtcagccgcttggcgatcagtccgccggtacagctctccgccgccgccagcgtcagtccccgttcccggcacagcgtcagcaccgtctcctccagtccggacacgtccgcgccgtagagatacgcgcccagccgggcccttacctccgccagcaccggcgccatccgcgcctcgcaggcacgctcgtccgccccgcgggcggacagctgcagcatcacctcgcccggcttggcatagggtgccagcgtcatgtccgcctcccgccgcagcaggtcgtccagcagctcctgcacctgcggctccgtcaggccgaagatatgcagcgtgtgtgaccgcaccgtctgtccccggacctgctccagccagggcagcaggcagtgctcggccatatagcggcactcacggggcacgccgggcagcagcgccgccatggtctccccggcggtgaacacgcaccccggggccgtgcccaccggattgcggaacacggtgcacccctccggcagataggcctgctgcatatcgcattccggcatctcccggcggaatacccggtcgaaataccgccgcatatcctccaccacctccgggtggaacaccagcggcgtgtccagcgcggcgcacaccgccgttttcgtcatatcgtcgtaggtgggacccagcccgccggtgaataccagcagctctgcccgtccccttgcgatggtcacggccttttccagccgcgccgcgtcgtcgtccacagtggtgtggtacagcacctccacaccggcggcagtcagcagccgggagaggaacgcggcattcgtattggtcacgccgccggtcagcagctcgctgcccacggcgatgatctccgcggtacggggcatagacgcgcctccttatagcgtaggtttgatccggatcatctcgcgtccggccatggcccgctggcacaggccctccacatccagcgcgctttcgtactcccgcgtctcctccacgctgggcttcgtcttggggtgccggggcgtgaacacggtgcagcagtcctcatagggcaggatggacgtgtcgaaggtgccgatatggcgggcgatcttcacgatctcctccttgtccatgccgatcaggggccgcagcaccggcatggtggtcacgtcctcgctgacggccagcgcctgcatggtctggctggccacctgacccagattttctccggtgaccagggcgcggcaccgcagctccagcgccagcatattggccaggcgcatcataaaccgccgcatgatcagggtaaagtgatcctccgggcatttgcggcgtatctcctcctgaatttcggtaaaggggatgatgaacaccgccagccggccgcaccagggggtcagctcctccgccagcttcagcaccttctcccgggccagctcgccggtatagggcggagaggcgaagtggatcatctccagctggacgccccgcttggcgatcatatagctggccacggggctgtcgataccgccggacagcaggctcaccgcgtggccgcccatgcccaggggcagaccgccggcggcggcctcggcggggccgtggacgtaggccgcgtcctcccgtacctcgatgtacaccgtcagctccgggtggtgtacgtccaccgtcaggtgggggaaggcgtcgtggagcgcgccgcccacccactggctcagctggatggagcccatggggaaggacttgtccgcccgcttgctctccaccttgaagctcttagccgcggtcagcgcaccgcccagataggtctttgccgtgtcgaaaatagcctccttgctcttctcgcaaggcagcgcccgggtgatggcgatgatgccgaacacctgcttgcaggcagcgtaagccccggcgatgtcgcatttctcctccgccggctccacatagatagtggactggcgggaatatatcttccacttgccgaaccgctgggtgcggcggcggatgttgctcatcagcttcatctcaaagctgcggcggttcagtcccttcaggaccacctcgcccagcttgcacagaatgatctcgtgcatatggttctctccttgttgttggtgtacagatgtggggacggcgggcgggcagcttcatccgcccctacaacggggcgtcgtaccccaagggcatttgttccgctgcgctccactgcgggacgccgtcccctacggacgtttatcggcggcgtactgggtctgacgatggctgggcggaaaatatcccgccacggcggtgagattttttgtcccgccgatggcaagctgacgacggcgtatcaggtatacgccgaggagacttgacgatggcagggcggaaatgtatcccgccacggcggcgagatttttcgtcctgccgatggcaagctgacgacggcgtatcgggtatacgtcgaggaggcttgacgatggcagggcggaaaagatgccgccgtcatttcagtgtactgctgctgcggtactgtatggcctcggcaagatgtgccgcctcgatgcgctcgctgccctccaggtcggcgatggtgcgggccatacgcagtatgcggtcgtggctgcgggccgtcaggcccaggcgctcaaaggcaccctgcatcagcttttcgccggcggcgtccagcgcacagtactggccgatcatggcgggggtcatgtaagcgttacaggacacctccgtccccgcaaagcgctttttctgcacctcgcgggcggcgttgacccgttcccggatggccgatgacggctccggctgctccttgcggcgcatggcctcatattccaccgacggcacatcgatgtgcatatcgatccgatccagcagcgggccggagatgcgctgcatatactgttccacctgctggggtgaacaggtgcagcgtccggaggggtggccgtaccagccgcagcggcaggggttcatggcgcacaccagcatgaagcggctgggcagcgtcagggagccggaggcccgggtgatggtcacaaagccgtcctccagcggctggcgcagcgtctccagtgccgccttgctgaactccggcagctcgtccagaaacagcacgccgttgtgggccagggatatctctcccggccggggtatccccccgccgccggagagcgacacggtggacgccgtgtggtgggggctgcggaagggccgcgtatccaccagcgggtgccgcgggtcggtcatgcccgccacggaatagatctccgtggtctgcagggcctccgcccgggtcatgtccggcaggatggacggcagccgccgggccagcatggacttgcccgcgccgggcgagcccaccagcagcacattgtggccgccggcggcggcgatctccagcgcccgcttcacattctcctgtcccatcacgtcggcgaagtccggcaggggccggtcctgatgtcccggcgtccaccggggcgccggcgtcatgacctgctcgcccttcaggtgggcgatgagctgtcccacgtccgtcacaccgtacacggtcagcccgtcggccagggtggcctcggcggcgttggcctcgggcacatacagcgtatcgatgcccagccgcgccgccgtcagcgccatgggcagcacgcccgtcactggccgcagcgcgccggagaggctcagctcgcccaaaaacgccgcgccctggggcaggggagatatctcctccgccgcggccagaatgcccagcaggatgggcaggtcgtacaccgtgccctccttccgcacccgcgccggagccagattgaccgtgatgcggctgacagggaacttggccccgcagtttttcaccgccgcccggacacgctcccgcgactccttcaccgccgcgtccggcaggcccaccacgtcgaaccccggcagtccgccggacagaaagcactccaccgacacctcatatccggtgatgcccgtcaggcccagcgaccgtaccgtcaccatcatggacagcgccccctttacactaattttatagcaccgtacattttaccacaaaattcccgccgtgaacagccactttttccaaaaaagtcccctgccttttgcgcggagtgcatgaacctgtcccgccgccgtgagaatttttgtgcatggcgctaaaaaagttttatcgtggcacaaatcacgaaaatgtgggtttacatccaggattttttgtgctactatgacggtgcctaacattccgtacaaaggggtctttgcgcccttctggcggtacggaagtatataatgtaaggaggctcattatggtaagaaaaatgaagtccatggatggcaataacgccgcggcgcacgtttcctacgcgttctccgaggtcgcagccatctaccccatcaccccgtccagccccatggcggacttcgtggaccagtggagcgccaacggtctgaaaaacatcttcggcaccaaggtcaaggtcgtcgagatgcagtccgaggccggtgccgccggtgctgtccacggctctctgggcgccggtgccctgaccaccacgtacaccgcgtcccagggcctgctgctgatgatccccaatatgtacaagatcgcggctgagcagctgccctgcgtgttccacgtgtccgcccgtaccgtgtccactcaggcgctaaacatcttcggcgaccactccgacgttatggcctgccgccagaccggcttcgccatgctgtgcgagggcaacgtccaggaggtcatggatctgtcccccgtggcccatctggccgcgctggagggcaaggtccccttcatcaacttcttcgacggcttccgcacctcccacgagatccagaagatcgctgtctgggactacgaggatctgaaggatatgtgcgacatggacgccgtggccgagttccgccgccacgccctgaaccccgagcatccccatatgcgcggcagccacgagaacggcgacatcttcttccagcaccgcgaggcctgcaacagctactacaccgccctgcccgccgtggtcgagaagtacatggacaagatcaacgccaagctgggcaccgactacaagctgttcaactactacggcgccgccgacgctgaccgcgtcatcgtggccatgggctccatctgcgacgtggccgaggaggtcatcgactacctgaacgcccacggcgagaaggtcggcctcatcaaggtccgcctgttccgccccttcgccgccgaaaagctggtggaggccattcccgccacctgcaagaagatcgccgtgctggaccgcaccaaggagcccggctcccagggcgagcctctgtatcaggacgtcgtcaccgccctggccaacgccggccggaacgacatcaccgtcatcggcggccgttacggtctgggcagcaaggacacgcctcccgcctctgtcttcgccgtctataccgagctggccaaggccgagatgaagcgtcagttcaccatcggcatcgtggacgatgtgaccaacctgtccctgcccgaggataagaactgtcccaacaccgcggcccccggcaccatcgagtgcaagttctggggtctgggcggcgacggcaccgtcggcgccaacaagaactccatcaagatcatcggcgaccacaccgacaagtacgtccaggcatacttccagtatgactccaagaagaccggcggcgtgaccatcagccacctgcgcttcggcgacaagcccatccgcagcccgtactacatcaacaaggctgactttgtggcctgccacaaccccagctacgtgaccaagggcttcaagatggtgcaggatgtcaagcccggcggtgtctacatgatcaactgccagtgggacttcgacgagctgaaccaccacatggacgccgcctccaagcgctatatcgcccagaacaacatccagctctacaccatcgatgccattgacctggccatcgagatcggcatgggcaagcgcaacaacaccatcctccagtccgcgttcttctctctggccaaggtcatgcccgaggaggaggccatcacctacatgaaggagaaggccaaggcctcctacctgaagaagggccaggacatcgtggacatgaactacaaggccatcgacctgggtgccaccgcctataagaagatcgacgtgcccgccgactgggccaacgccgtggataccaagcccgccaagcagctcaagggcaagcccgagctggtgaagatggtcaaggatatcctggagcccgtgggcaagatggacggcgacagcctgcccgtctccgccttcgtggatcatgtggacggccagttcgagctgggcgccgccgcctatgagaagcgcggcgtggccgtctccgtccccacctgggacgccgagaagtgcatccagtgcaaccagtgcgcctacgtctgcccccacgccaccatccgtcccttcgccctcaccgctgacgaggccgccaaggcccccgaggctgccaagatcgtggatgtcaaggccggcaagggcaagggcacctatcagttcaccatggccatcagcccgctggactgcatgggctgcggcgtctgcatcggcgcctgcccggtgaacgccctgtccatggtcgcccaggagggcgagctgccccagcaggacgtgttcgactactgcgtggccgaggtgtccgagaagaaggatatgcaggacaacaccgtcaagggcagccagttcaagcagcccatgctggagttctccggctcctgcgccggctgcgccgagaccagctatgcccgtctcgtcacccagctgttcggcgaccatatgtatatctccaacgccaccggctgctcctccatctggggcggtcccgcggctacgtctccctactgcaccaacaaggccggtcacggtcccgcctggtgcaactccctgttcgaggataacgccgagcacggtctgggtatgttcaccggccagaacaagatccgcgaggatctggccgacgagacccgccagctgatcgctgtggagtgggcgcgtcccgagctgaaggccgctgcccaggcatggctggacaccatgaacgacggcaccgccaacgccgagcccgccaaggcctacgtcaaggcgctggaggagagcatctgcaccgtggaggagctggccgccatgcctcagctcgccgcgcacgccgccgagctgaaggccaagggcgccctgctgtgcgactgcgccgcctgcacgctggccgctgatatcctcagcaagaaggaatacctggccaagaagtccatgtggatcttcggcggcgacggctgggcctacgatatcggctacggcggtctggaccacgtcatcgcctccaagcaggatgtcaacatcttcgtattcgacaccgaggtatactccaacaccggcggacaggcctccaaggcctccaacatcggccaggtggcccagttcgccgccgccggtaaggaggtcaagaagaagagcctctccgagatcgccatgcagtacggctatgtgtacgtggcccaggtggccatgggtgccaaccccgcccagaccatcaaggccatcaccgaggccgaggcctatcacggcccgtccctgatcatcggctacagcccctgcgagatgcactccatcaagggcggcatgatgaactgccagaaggaaatgaagaaggccgtggactgcggctactggaacctgttccgctacaatcccgacggcggcgacaagaagttcaccctggactccaaggcccctgccggcggctatcaggagttcctgatgaacgaggcccgctactcccgcctgacccgcgaattccccgagcgtgcggacgtgctgttcaagcgcaacgaggacgaggccaaggcccgctacgagcatctgctcaagctcatcgatatgtacgacaaataagccgtatctcctcacagcacaaaaagagacagccttgcggctgtctcttttttgcgtttccccttccgctgtcaaaacttgtcaagcgcccatatttttccttgacgatacaccattcatgcaagtataatatttccattgtgtattcccaaaccgacagaaggggagagctccatatatgaaaaaccgcatcctcgccgcgctgctggcgctggtcctcggcgtgccgctgtacctgctggccgccgacgccgtccccaccgccgcggccaaaaccgtttcctccgccgcaccggcccaggccgtggccctgctgaaggcccttccctccgtggaggacctggccgccgctatgaccccggagacggacgccgccgccatgatcacccagaccagggccgacctccagcgggagatcgagcgccagaccggccccaagggcatcgacctgagctggtggcagagccactacaacgacatcatcggctacatttacagccccggcacccccatcagctaccccatcgcctacgacggcaacaacgagtattacctccaccacgatctgtacggcaattacagcgaatacggcaccatcttcctggacgcccgcgtgtccagcgacttctccggccacaacaacgtgctctatggccaccatatgtccgacggctccatgttcgcctccatctccaactataagcagcagtggtactacgacgcccacccctactttttcctctacaccaacgccggcaagtaccgggtagacctgttcgccggcatcgttgtccccggcacccacgaggtgttcagcacctctctctccgccgaccagctccagcgcttcatcaataattccaccttctactccggcaagggcgtcccctccggccagatcgtgaccctctgcacctgctcctacgaggcggccaactaccgctatgtggtcctgggcgaactggtcaagctggaggatacccctgctgacaccgccatggaggccgccgcatgacccacgaagaacaacaagccctttttgacaccatcctccgccgggccaacctccccggcagcttcaatgtggaaaacggcatccgcctgacatccctgtccgacggcggtgccgagggcgaggtccgcctgaccgccggccacctgaaccccctgggcatcgtccacggcggcgtgtactgcaccctgctggaccaggtagccggcgccgccgcctgcacccggggcagccgcggccttacggtgaactgcgagacccgcttcctgggcatcgcccagggcgacgtcctctgcggccacgctcaggccatccacatgggccgcaccctggtggtcatgcacgcctgggtcaccgacagtcaggataccctctgtgccgacggcacctacaccttccgcatgaagtccggcttcccggaggactgacctcccggcgcccctttcccgccccttgcagcgccccccctcggggcgtttttcttttccggttgcaatccccgcccaaatagtctatcataacagcagtacattctcccggaggaaacactatgtggtatgtcatcctgctggccgtctgcatcggcggcgaccagcttctcaagtggtgggtcacctcccacctggacgtgggccagtcggccccgctgctgccgggcatcgtccggctcacccgcctgcacaacaccggcgctgcctggagcagcttctccggcaagaccggccttctggccgccgtcaccatcgtcctgatggccgccgtggtctatctggtggtaaaaaagatcgtccgccaccccctgggccttacgtccgccatgctggtgcttggcggcggcgcaggcaacatgatcgaccgtctctgccgcggctacgtggtggatatgttcgacctggaattcatgtcctaccccattttcaacctggcggatatcttcgtggtcatcggcgtcctgctgggcgcggtgtactacctgtggttctacgacaaatacgacaagccgaaaaaggagcctgaccatgacgcgggagctgacagccgcaactgaacacgccggcgtccgcctggacgccttcctctccgccgacggcgcgctgacccgttcccaggccgcccgcctgatcgccgagggccgcgtccgtgtcaacggcaagcccgccgccaaaagcgcccgcctcaccggcggtgagacggtcaccgtggacgtcccccaactccgcgagacagccctgcccccccaggacatccccctggacgtggtctacgaggacgacgacgtcatcgtggtcaacaagcccacgggcctggtggtccatccggcccccggccacccggacggcaccctggtcaacgccctgctccaccactgcggcgacagtctctccggcatcggcggcgaaaagcgccccggcatcgtccaccgcatcgaccgcgataccagcggcctcatcatcgccgccaaaaacgacgccgcccacctggccctcagcgcgcagctgaaggaccactccctctcccgcacctatgagtgcctggtgaccggcaatatgaagcaggacagcggcaccgtggacgcccccatcggccgcagcagcgccgaccggaaaaagatggccgtggtccccaccggccgccgtgccgtcacccactgggaggtcgtcgcccgttaccccggcgtcacccacctgcgctgccgtctggagaccggccgcacccaccagatccgcgtccacatggcctacattggccaccccatcctgggcgacacggtctacggcgccaaaaagccggtccccggcctcaccggccagtgcctccacgccaccggcctgcgcttcgtccacccccgcaccggcgaaccggtggagctccactgccccctgccgcccgagttcaccgccatgctccaaaagctgcaaaacaagtcccagtaagctgtgcagccgaaaagaaggtaaaaagaccggccccgccggtccttttttcgtcccccgcccgcaggcgtcagccttccccttgaggggttcgcggcgttgaatgacacgcctccgttagccttccccttgaggggtccgcggtgttgaatgacacgcctccgttagccttcccccttgatgggtccgcggtgttgaatgatacgcctccgttagccttcctcttgaggggttcgcggtgggagtggcgcactctcaagccttccccttgaggggttcgcggcgttgaatgacacgcctccgttagccttccccttgaggggttcgcggtgggagtggcgcactctcaagccttccccttgaggggaaggtgcccccgaagggggcggatgaggtgtcgccgcgcagcggcgtaaaacgccctcgtcccgcccgcagccagcgcaggggctattacgtgtctccgacgggtcacttttgtcaacagcgacaaaagtgaccaaaagcaccgcttagacctacggtctaagaacccctcgcgcgctatactcagttgcgatttcccgcgtattctcgcgggcatagccttttgtcgtcgttgtcggacaaaaggactgtgcctgcgttcaccggcgcggaggctggcgcggccgcttgccccagccacggtagacgttttcgctcctaccgccgccccctccaagccttcccccttgatgggtcgcggtgttgaatgacacgcctccgttagccttcccccttgatgggtcgcggtgttgaatgacacgcctccgtcagccttccccttgaggggttcgcggtgttgaatgacacgccggtggcgtgtcagatccgcggaccgaccgacccgcagggagacaggtgcccccatatcccggcggcgtcagccgccacctacccattgcggtgcaaaacaccgcaatgggcgcgatttgataatcgccactcgaccagcgcaccagcccctaccctcactgctgtcagcggcagcggcgcagggataatttcgcgccccggcgcgagctacttttgtctgcggtgacaaaagtagccaaaagcaccgcttagacctacggtctaagaacccctcgcgcgctatgcctgttcgctgccgcccacgctttccctcacgtaaccggcgttttcctgatcgttgtcgttcccccgactgtgccagcacagctttccgctgccgctgcctgctactacggcaaaaattattcgttctgccgtgtcgcaggctaagaaatcattatatccgttcccaacgggcacacctacctttgccgccttgcggcggcaaaggcgcgatttgataatcgccacccggtagaagcaaacacccctaccgtggctggggcaagcggccgcgccagcctccgcgccggtgaacgcaggcacagtccttttgaccgacagtgatgaccgctgcaccccgcccgcgagtacacaccgccaaattcgcacttgcccgccccgcgccaaggggtccttagaccgtaggtctaagcgactttctttcccacatttctttcttcgcagaaagaaatgtggccgccggaggccgcctccccgtcagggggaaaccgactcgccgccggggcggcgaaaccctccccgcgccaagggacccttagaccgtaggtctaagcgactttctttcccacatttctttcttcgcagaaagaaatgtggccgccggaggccgcctccccgccagggggaaaccgactcgccgccggggcagcgccccccgcgcaggcgcaaaaaaagagacggccttcgccgtctctttttgtatctcatcagttgtccgtgcggttccgccactccaactcctgctccagctcgaatttcagcttcttgttctcctccaccagcgtgtcgtagtgggtgccctgcacgtagtacttcacgaacgcaaacgtggcctcgttgaactcctcctccgtgtactccggcagcagggagccgttcttccggcgcagaccggtgacctcgatcaccaccagccggcggtgctcctcggacagctgaaacagcttcagctgctcgggaatttccagctccaggtcacagcgctcgtttacgatctccagcagacggcgctgctccggcttggcggacacgatgacgccgtgctcggcaaacagccgcttcagatagctggcggagacctcctcccgggtaatcgtgcccttgccgatgccggtgagcatggtgttggacaggttcaggctcacatagacctcactgccggtcttcgggtatttcatggacgtacctcctgatgttccgttttattcgcctcgcgggcgtggcttcgttctgcgtataccgtaccacattctataagaaattgcaactattatatgataaaaacatggtgtttttctaaaaaatacatggttttcatcatcccaaacgtaccaaacattttatacgcgcctcctgccgtcccggcaaactttccctattcaaacgcctcgcgatgtgatacaatgttgccatagcacagtgcgggcgggcacgcctgcccgacacgataaggacaagggggctctgccatgaacatccagcgcgcctatgtggagatcaccaacctctgcaacctccactgcgacttctgcgccggccaccaccggccgctgatggccatgcgtaccgacgactttgcggtggcggccaaaaagctgcgtgccgtcacgcagtatatctacctccacgttatgggcgaaccgctgctccacccggagctggggaaaattttggatacctgcgcccagctggacttccgtgtctgcatcaccaccaacggcacgctcctgcccaaaaagttggatatcctgcttgcctgccccgccctgcataaggtagctgtctctctccattccttcgagggcaaccacctgaacgtgcccctggaggactacgtcaccggctgtctccgcagctgccagaagctggccgccgctggggtcaactgcaccctgcgcctgtggaacagcggcatgccccaggccctgaacccggagatcgagcgcattctgggcgagctcaccgggcagaataccgcccacctccccgaggatatgctccacaaccgccgcctggccccccgcatctacatacagaaggacgagcacttctactggcccggcgacgagaacaacgactgccccgacgacacccagtactgctacggcctgcgccgccagctgggcgtgctgtgcgacggcaccgtgatcccctgctgtctggacagcgagggccggctggccctgggcaacattttccaccagagcctggactacattctcaacacgccccgggcccagcgcatccgccgcggctttgactgccgtaagcccgccgaggccctctgccgccgctgccactacgcctcccgctttaatatacctttaccacagagcaacaaaaagtaacgatcagacaacagcatttgaaaataaatggcaaacaagagtaacaaaaacagcaaccaaagctcccataaaataccagtcccgctggcctctctgccggcagtcctgctgccctggtacgaccgggaaaagcgttctctcccttggcgagatatcgttacgccttatcgcacctgggtgtcggagatcatgctccagcagacgcgggtacaggcggtgcttccctattttgatcggtttatggccgccgcgccggacgtgcccgccctggcggaattagcggaggaccgcttgctctccctgtggcagggcctgggctattacagccgcgcccgcagcctgcagcgatccgcccgtgtcatggtggaccaatacggcggctgtctccctgacacgtacagcgatttgatacagctccccggcatcggcgactatacggcgggcgcgatactctccatcgcctttaataaagccgttcctgccgttgacggcaacgtactgcgtatcgcggcgcggctgaccgcctgcggcgataacgtccttgacccgcggacacgccagcatgtccgcgatgcgctggcggccgtcatgcccaccgaccgccccggcgattttaaccaggccatgatggacctgggtgccgcagtctgcttgccaaaaaatcccaactgcgaaagctgtcccgccgcaagcctttgtgccgcaaaggctgcggggcttcagtcccggctgccggtgcgggaaaaaaataccgccaagccggaaaaggacctgacggtctttctgctgaccacccccgatggccgcaccgccctgcgccgccgcccggaaacgggcctgctctccggcctgtgggagtttcccaacaccgaggggatgctgacggaagcccttgcggcacaacagcttcgggactggggactcacgccgctttcctgggagaagcgcttttcggacaggcatatctttacccatctccgctggaatatgacggtatttcgcttaaccgtcgctggcgacggccctccggattgggtctgggcatctgatgaccgggatctctaccccatgcccaccgccttcaaaaagttggaaaataaataaaatcgtatgcaaataaaggagaaacagggatggcacagttgtattttaagtttggcgccatgggctccagcaagacggccaacgcgctgatggcgcggttcaactacgaggagcgcggccaggagacgctgctggtaaagccccgtctggacacccgtgacggcgaccatatggtctattcccgcatcggcctgaaacacccctgcatctactttgacgagatgcgcgaaatgtcggaaaccgaactgcagacctatgcctgcattatcatcgacgaagcccagtttctgacaaaagatgaggtctattacctcgtccacctcgtcgatgactgcagcatccccgtcatctgctacggtctccgcgccgacttcaagggcgacttgttcccgggcagctaccacctgctggtgctggcggacaagctggaggaggtcaaaaccatctgctggtgcggcaaaaaagcggcctttaacgcccgtttcgacgaaaatggccatgtggtaaaggagggcgcacaggtggtgctgggtgccaacgacaagtatatcggtctgtgtcgccgccactggatggctggcgacctgggcccggattttgacatccacaaggtatgatctgcaccttatgtccccgtaactgcggggcagagcgcactgcggagcacggcagcggattctgcggtatgcccgccggactgcgggtggcacgggccatgctgcaccagtgggaggagccgcccatctctggcacaaatggcgcgggaacgatgtttttctccggctgtaccctgcggtgctgctactgtcagaatggcagtatttccgccggtggtcagggaaaggatatctccacggcgcggctgcgggagattttcgacgagctgatctcccggggcgcacacaacatcgaactggtgacgcccacacactttctgccgtggatactgccggccctggagccaaagcttccggtaccggtggtgtacaactgcggtgggtatgaaaaggtcgatacgctgcggcagctggaaggaaaggtagacatatatctaccggacctgaaatatgccgacggcgcgctggctaaggcactctccggggcggaggactactttcccgcggcctgcgaagccatacgggagatgttccgtcaggtgggacggccggtgtacgacgagaacgggctgataaaaaagggtgtgatcctgcggcatctggtactgccggggtatctgaacaacacccggcaagtgctggactggatcgcggagaccttcgcgcccggcgacgtggtggtatcgctgatgagccagtatacgccgccggctggcatgacgggccgactggcgcggcgggtgacggcggcggagtaccgggcggcagtgacctatatgcggaactgcggcattgaggacggcttcgtgcaggaacggacctccgccgaggatgcatacacgccggcttttgacggaacaggcgtataacagcaaaaaaagaaagcccttcgggctttctttttttgctgttatcgggcctgggcgcggtcataggagaccaccacgcggcggtttggctcagtgcccacggagtaagtggtgacaccggggacatcctgcagggcggcgtggatcacatggcgctcgtaggcattcatgggctccagggtcacactgcggcgatacttctgtaccttggacgccaccttgcgggccaggctctccagactctgctcacggcgggcacggtagttctcggcatccatctggacgcgaacacgcttgctgtcgctgccggtgttgatggcataattggtcagctgctggatggcatccagcgtctcgccgcgatggccgatcagctgacccagacgctcgcccaccagaatgaccttgtagcggcccttctccacctcgtagaccttgacctcggcggcactgtccatatgctggagcagaccggagacgaaggcgatgatacgcttggcgttatcgtcatcacactcgggcaggtcgatggccggggccacaggggcgggacgctccttcttttcggggcggggacggtcgctgcggtcgggacagctctgacggtcctgacggggcttgtcagcctttggcgctgccggtttagcggggacggcgggcttgggctccgctttgggggcggcaggggtctcggggatgatcttcacctcggcgggggcggcaacgtctgcctcctcgggaccataggtgatacggatacgggcgggggtggcgccgatgcccaggaagccggtcttggcacgctccagaatggagacagacacgtcatcgcggtccatgcccagctgctcaaggcctttacgcagcgcctcgtcctcagtcttgcccgttacgtcgatataactcatagacaaaactccttattcgtcgtagtgttcctcgcggtaggcgcggccccgtgcgtagggacgattgcccaccttaccggcttccgtggtgctctcgccggtctttttctttttgggttggggctggggcttcttgcctcccttggactgggcctgctgctccagctgacggttgtaattctcgcgggcagcctgcattttagcgtagcgggcctcgcgcttctggcgctccttgtcggtctcctcgcggtccagcaccttagagaagtgcttgttcagcacctgctcctgaatgcaggagaaggcggcgttggcgatccagtagacgcacagggcggcggggaggatgtagcccatccacaccgtcatcaggggcatcatgtagagcatcgccttggaggagccgttcatgttgctgttgccgttggtcttcatggagatgcgggtcatcaggaactgcagcgcggcggagatcagcggcatgagcatgatgccgatgacgggccagccgccggaggggaactggctgaacagatccttgggcacggcggacaggtccatgctgaggaaggtgtagttcaggtcgataagaccatcgaatttaccctcgaagctggaccagttatcgtggatgaacttggccagatagatctggtcataagcagaggcctgaccactggcgccggacacataccccagggacaccgccagctcggtgatcttggcgatgacctcgttggacagggacatgaagtagcgcagaggtgtgcggatgatgtagtacagggcgatcaggatggggaagggcaggaaggaccacaggcacccggacatggggttgacaccctcgcgggcatagaggtccgcgatctcctgctgctgcctctccttgttgttggcgtattttttctggatctcctgcaccttgctgttcatgcggcccatgcggagcatactcttcttgctcttgagctggaagggaagcagcaccagcttgacgatcagggtgaagaggatcagagcgacgccgtaagagcccgtccaggtatagaacaggcgggtgagccacgcgaacggcacacagatgtagtagccgagttgtgcgaacataggcttttattcctccgtagttttttgagggggtggcttcagggcaccggatcataccagccgcccttgtgatggtggaagggatggcaccgcataagacgcttgaaggccagccagccgcccttggccgcaccgtatttctcgaccgcctcaagggcgtactgcgagcaggtggggatatagcggcagcggggcgggaacaggggcgagacggcccggcgataaaagcggatagcggagagaagaagtcttttcatacatcctcccgcagcaatcccagctctgcaaggcagcggaggtattgcttttccagcttatgatagggcagctcggcggcacggacacggcccaccatgataatatcccagccggggagcatatcggccctgtgcaggcgatagagctcacgaaaccggcggcggacacggttgcggaccacggcgtggcccagcttggtggagacggtgacgcccaggcggctcatgccctgtctgttcttcaggcagtagaccaccacgccgccggagacggcagaccggcccctgcggtaaatgcggcggaagtcgctgttttgcttcaccgttactcttgcgtccatagttccctcgctatactggttttgcctcgccagatacaccgatagggacggggatctcgatcctccgtccctcagggcttatctgtatgtgcgatgcaccttccgtgacctcaatgggtcagacgggcacgacccttggcacgacgacgggccagaaccttgcggccgttgcgggtggccattctcttgcggaagccgtgctccttggagcgctgacgcttcttgggctgataggtacggaacattgcatgacacctccatttttaagattatccggcgggacaacaaggccccgcgcttactcgacagcggtgagatattcaccgccgcagtaaacatttccacgcctgttgcacatctgcgtgcaaccacgcggagtatattatacagatacaggggggcactgtcaacaaaaatttacccacaagcgcccgtttttgcgggaaaaacagggaaaaagccggcagtttatatttagaataggtgtagacttccggcgtgttttctgctataatgtagtgggatattttgcggcggtataccccccgccattttactgcggaggaaaacagacagcctccgccgaaaggggagcttttgcttgaattccatgaaagacctgtgggacagcgtgctcaagcggctgagccatgagctgtccgagaccaccatcaacacctggttcgacgaggtaacggtggtaacgatggaggactcggccttcgtgctccattgcagcaatacctttaaaaagagcaccatcgaggcccggttcctgccacacatcaaggcggcgctgcgggacctgttctccacggacctggaggtaaaaattctggacgatcagcagctggcggcttaccatggtgtggcgccggacaggccgggcgatctgtcagagtcggaggccttcaccttcgagacgtatgtggtgggaccccagaacaagctggcctttgccgccgcaaaggcggtgacggaaaagcccggcgagaactacaacccgctgtttatctacggcgactccggactgggcaagacgcacctgctgtacgctatcgccaacgccctgcgtaaaaagcggccagaggcacggatcgtctatgtgaagggcgacgacttcaccaatgagctgatcgcctccatccgggaaaaccgcaacgcggaattccgggaaaagtaccggcagacggatatcctgctgatggacgatatccaattcatcgccggcaagatacagacccaggaggagttcttccataccttcaacaccctgtacgagtccggccggcagatcgtgctgacgtcagaccggccgcccaaggagatcactcagctggaggaccggctgcggacccggttcgagtggggcctgatggtggatgtggcgccgccggactttgaaacacggttcgccatcgtgcagaataaggcagccatgctgggcgtgaagctgcccaacgaggtgacggactacatcgcggagaacatcacctccaacgtgcggcagatcgagggcacgctgaacaagatcctggcctaccgggatctgctggacgaccaggtcaacgaagagaccgtcagccgggccatccgtgatatgctgaagaagagcaacgactttgcccccacccctgccattatcgtgggatacatatgcagctacttccatgtggacgaggaaacgctgcggggacagagccgcagccgcgatgtggtggccgcgcggcagatcgccatgtacctcatccgccgtatgacctccatgagcctgaacgacatcggcaaggagttcggcgacagggaccactccactattctgcactctctggacaaggtggagagcacgatgcgctctgaccccgcctttgccgaaaaggtgaaggagatcaccaccaacatcaacagcaaaaagtgagaaagcgcgggtgctggcgagacagagcgaaaggggagggttttccccatttcctgtgtaatccacgtggaaaatctgtgcaacatccgcatcacacatgaagatgtgggaaacccggcgtgttttccataaaggtatgtctataaaaaagccgataacggcgcgggataaacatggatgtccacataaaatttccctactaataagactactgaaataaaaaattagtttatgatttgatttagaaaaatagaaccgcttttttgcgtagggctgatctttcagacagcgcaggcggcaatgactttcggaaagcgaggaacgacggatatggtgagattttcctgtgaaaaggcactggtacaacaggcggtggccgcggtgtctcgggcggtagcggctaaaagctccatcccggcgctggagggtatcctgctggagtgcggcgagggactgcggctgtccggctataatatgcagaccggcatacgcaccacggtggaggccgcagtgtccgaggcagggcacatcgtgctgaacgccagactgttcggcgagatgatccgccgcctgccggatgatatggtgacctttgaggcagacgacaagtttaacgtgaagctgaactgcggcgatgccagcttcgagcttcccggcctcagcgccgacgactatccggagctgccggaggtggacgaccagttctccgtcacactggagcagcggacgctgaaggccatgatcaaccagaccagctttgctgtttccgtcaatgaggcccgtcccatccacaccggcgccctgtttgagatcagcgacaagggactgaccatggtggcggtggacggcttccgtctggcgctgcgccgcgagccgctggagcacatcgacggcggggccttcaagttcgtggcccccggcgccgccctgaatgaggtggagaaaatatgcgccgacaccgacgacatggtgacggtgacccagggcaagcgccatctgatgtttgaggccggggctacccagctgatatgccgccggttggagggtgaattcctggactacaagaatgccatacctaccaccaaccccatctgcatcgaggtggacaacaagacgatgatcgaaagcctggaccgcgtcagcgtggtcatcagcgagaagctgaaaagtccggtacgctgcctgttcagccaggaccgggtgtatatgtccgcccggaccggaaacggcgaagcccgggatatctgccccgtccgcggcgacggacaggagctggagatcggcttcaacaaccgctatctcatggacgccctgcgctatgccccggcggatacggtgaaaatgcagctgaacaccggtatttcgccctgtatcatcacgcccgtagatgacagtgacaactttctttatatggtgctgccggtgcgcctgaaggcgcaataaaggcacatctcttgtgccctgccatcgctacacctcctcgacacacacccggtacgccgtcgttggtttgccatcggcagaacgcaggagctgcacctttatcgaactgtgcgcgctttttattgaagaaaaaaacggcatattatatctatgaacgaggttcattattatggagactatcaccatcacaacggaatatataaaattgcaggatctgctgaagtttgccgcggcggtagagaccggcggcgaggccaagctcgtcatccaggagggtgacgtgacggtcaatggcgaggtgtgcaccatgcgtggcaagaagatccggcccggcgacgtggtggccttcaacgggcagacgctgacggtgacgtatgagagttgacgccctgcacctgcagggctggcggaactacggcacgcaggcgctgacgttcgaccccagctgcaacgttatttacggagagaacgcccaaggaaaaacaaatctgctggaggccatcgtatatcttagctgtggaaaaagtccccgcgcccacggagacaaggagctgatcggctttgatatgcaggaggccgcgctgttgggaaatatcttttcccgacagcgggaatttgtgacggacatacgcctcttccgcggaaagcggcggaaaatgaccgttaacggtgtgcccgccaaaaacagcgccgccctgtccgacgtgctgcatacggtgttttttgcgccggaggatctgtttttgatccgggccggtgcggcggaacggcggcggttcatggacctgtcgctgtgccagctgcgaccgcggtacgccgaggcgctgagccagtacagccggctgtatgagcacaagacccgcatcctgcgggacagcgaggacaagccagagcttttggacctgctgccggaattcaacgagggcctgtgccgcagcggcgcagtgctggtaggctatcgggcgcggttctgtgcggcgctggcggaatatgcccggcaggcacactatgagtgcagcggcgagagggaggagctgaccctgacgtaccagaccgtcaggaccgtcgccgacccgctgggcagtcaggcagatatctacgcggcgctgacggcacatatggagagccatcaggcggcggagcgtgcggcgaagctgtgtctctccggcgcccacaaggacgatatcgaggtgctggtcaacgggcgcagcgcgcggcagttctgctcgcaggggcaggtacggacggcggcactgagcctgaagctggcggagcgcgagatacacaaaaacgccatgggggagtatccggtaatgctgctggacgatgtgctcagcgagttggatccccggcggcaggaatacgtactgaatcgcatcagcggcggacaggtgtttatcacctgctgcgaaaacgaccggctggacacgctgctcagcggcagggtgttccatgtgcggggcggggaggtactgtgatggcgtatctgcacatcggtatgaacgtgatggtagaggaccggcgggtcatcggtatctttgacctggataacacctctacctcaaaaaaaacgagagagtttttacagggagccgagcaggagggcgtggtacagagtgcctgcgaggacataccgcggtccttcgtggtgtgtgaccatccctatcaccggcagatcgtgtatctgtcgcagatcaattcccggacgctgggcaagcgggtccaaggaaaaggagagtagtacatggcagaactggaaaagaccgtggtggatacggaatacaacgcatcagaaatacaggtgctggaggggctggaggctgtgcggaagcggccgggtatgtatatcggttctaccagcgccagcggtctgcaccacctggtatatgagatcgtggacaacgccatcgacgaggcgctggccggctactgcacggacattaccgtgaccatcaacgagggtgacaccatcaccgtcaccgataacggccgtggtatccccgtggatattcaggcccagacgggccggcccgccctggaggtggtgttcaccgtgctgcacgccggcggcaagtttggcggtggtggctataaggtttccggcggcctgcacggcgtgggcgcgtccgtggtgaacgctctgagtgagtggctgacggtgcaggtacacaaggacggcaaaatctatgagatgaaattctcccggggcaatatcacccaggagatgaaggtcatcggcgagacggaccataccggcaccaccgtgacctttaagccggacccggagatgttcgacacgttggagtatgactacgagacgctgcacacccgtatgcgggagcaggcgttcctgaacgctggtctgcggatcactatcagcgacgcccggccgggcagagagaagtccgaggccatgtgctatgagggcggcatccgggagttcgtcaccttcatcaaccggaacaagaccccgctccacgaggaggtcatctatctctccggcgccaagggcgacagcacggcggagatcgccatccagtataacgacggctacaacgagacgctggtgtccttcgccaacgacatccatacgccggaaggcggcatgcacgagacgggcttcaaggcggccctgacccgcgtgctcaatgcctacggcctgaaatacggcatgatcaaggagggagacaaggtctccggcgaggacgtgcgcgagggtatcacggcggtgatctccgtgaagctgacggaggcccagtttgagggccagaccaaggccaagctgggcaacgcccatatccgcacgctggtggacagtatcgtcagcgaccagctggcggtgtatctggaggagcatcccatggtggcccgcaccattctggataaggccatgaccgccaaccgcgcccgggaggcggctcgcaaggcgcgggagtccatccgccgcaagacggtgctgggcggcgcggctatgccggataagctccgggactgcaacgaaaataaccccgagctgacagagctgtacatcgtggagggcgactccgcaggcggctccgccacggcgggacgggacagccggttccaggccatcctgcccctgtggggcaagatgctcaacgtagagaaggcccgggtggacaaggtctacggcaacgacaagctccagcccgtcatcatcgcgttgggcgcaggtatcggcgaggagttcgacgagaacaagctgcgctatcacaagatcatcatcatggccgatgccgatgtggacggcgcccatatccgcaccctgctgctgaccttcttcttccggtatatgcggcccctcatcgaggagggctacgtctattccgccgtgccgccgctttacaagctgatccggggcaagacctcccgggtggcctactccgacgaggagcgtgaccgggtgtccaacgagatgcggaacggcgaccccaacgtgaaaatcggtatcagccggtttaagggtctgggcgagatggacgcccatgagctgtgggagacgactatggatcccaacacccggacgctgcgccgcatcacgctggacgatgccgtaaaggccgacgctacgttcaccgtcctcatgggcgagaaggtggagccccgcaaggagtttatcgagcagcgcgctaagtacgcggtaaatctggattattaaggaggtcgtgtcagtatgagcaaaaagccccaatacgacccggaagaaatacgctttcccaaccagcatatcgtagagtccccgctggtgccggagatggagaactcctatatcgagtacgccatgtccgtcatcgtgggccgtgcgctgcctgacgtgcgggacggcctgaagcccgtgcaccggcgtatcctgtacgccatgtacgaggataacctgaccagcgacaagcccttcaagaaatccgccacctgcgtgggcgatgtgctgggccgctatcacccccacggcgacgcctccgtgtacgacgcgctggtgcgtctggcgcaggatttctccatgcgctatatgctggtggacggccacggcaacttcggctccgtggatggcgaccccccggccgcctaccgatacaccgaagcccgtctcagcaagatctccaacgagatgctccgcgacatcgaaaaggacacggtggattgggaccccaacttcgatgagagccgcaaggagccccgtgtgctgccctgccggttccccaacctgctggtgaacggctccagcggtatcgccgtgggcatggccaccaacatcccgccccacaacctgcgggaggtcatcggcgcgtgcatctgcgtgctggataacccggacgccaccctcagcgacctgatggagcacgtcaagggccccgacttccccacaaagggcatcatcatgggcagaagcggcatccgcgccgcctacgccacgggccggggcaggctcatggtccgtgcccggcatgagtttgaggagttcaacaacggccgcacccgtatcatcatcacggagctgccctatcaggtgaacaagcggatgctcatcaaggccattgccgaccaggtggaggacaagcggctggagggtatctccgacatccgggacgagtccgaccgcaacggtatgcgtatcgtgatcgagctcaagcgcgacgctaatccccaggtagtgctgaaccgcctgttcgcccagacccagctccagaccacctttgccatcaatatgctggcgcttgtggaaaaccagcggcagccgaaaatactgtccctgcggcacatcatcgacgagtacctgaaattccaggaggagatcatcatccgccggacccgcttcgacctgaaaaaggcacaggagcgcgcccacctgctggagggcctgctcatcgcccaggacaacatcgacgaggtcatcaagatcatccgcagcagctacgacaacgccaaggaaaacctgatgcagcgcttcgggctggacgacgtgcaggcccaggccattctggatatgcgcctgaaggcgctgcagggtcttgaccgggagaagctccagaccgagtacaaggagctggaggagaagatcgcctacttcctgcgtatcctcagcgacgagggactggtgaagtccatcctcaaggaggaactgaccgccattgccgacaagttcggcgacgaccgcaagaccgagatacaggacgtggaggacgagctggacatcgaggacctgatcgaggaggagcagtgcgtcttcaccctgacggagaacggctacatcaagcgcacgccggtcagcgaatacgccgcccagagcaagggcggcatgggcaagaagggcatcaccacccgtgaggaggacacggtggtggacgtgttcaccgcgtctacccacgactatatcctgttctttaccgacaccggcaaggtctaccgcaagaagggctatcagatccccgagagcggcaaggccgccaagggcgtgaacatcgtcaacatcattcaggtggagacgggcgagcgggtgcaggctatgctccacttccgggagacgggagacgaggagctgtacctgttcatgaccacccggaacggcacggtgaagcgtctggaggtcagcgccctgaagaacctgcggaacaacggtatccgcgccctgacgctggacgaaggcgaccagctgatctccgtgacggagacgcgggggcatgaccgtatgcttatcgccacccacgacggacaggcggtgtgcttcgacgagacggatgtgcgcgccatgggacgtaccgccgtgggcgtccggggcatccggctgcgggagggcgactatgtcattggcgccgcccgcgccgacgcggacaagaccgtgctgtccatcaccgagaacggctacggcaagcggacgcccattgaggagtaccgcattaccaaccgcggcggcatgggtatccgcaactatatggtcacggacaagaccggcccggtggtgggcatgaaggtggtggaaggtaccgaggacctgctgctggtgacggcagcgggcatcctgatccgcacacctgtggaaaatatccgcgtggcgggacgtgccacccagggcgtcatcgtcatgcgcttcaaggaggagggcgaccgggtcatctctttggctctggccgatcccgaggagaaggagcagcccgcgtcggaggaggccccgctgtgaacggctccgggctggacatcatcgcgcggatagagacgccctttgcggagaagttcggcgtgccgcggcagagcggcattgccgacagccccggacgcatcgtgttcgaaaagcccttccgggacgtggatgcggtgcggggcctggagggcttttcacacatctggctcatctggcagtttgaccgggcgcagcggcagagctggtcgcccacggtgcggccgccccggctgggtggcaacgagcgcgtgggcgtgttcgccacccgttcgcccttccggcccaacggcctcgggctctccgccgtggagctggagcgtgtggccttggacgagccggaggccccggtactgtatgtccggggcgcggatatggtcagcggaacgcccatcgtggacatcaaaccctatctggcctacgcggacagctatcccgacgccgccggcggctttaccggcggcggtgccggcgcggtgcttacggtggactttcccccggagctgctggcgcagtttgacagtgggcagcgccacgggctgctgagcgccctggccgccgacccgcggccccggtatcaggacgaccccgaccgcgtgtacggcatggcttacgcaggaaagaacgtgcgctttaccgtgcaggacgggaccgtgcgcgtcgttggggtggagtgaaggaaggatatatgagaaccgttacgatctacaccgacggagcctgctccggcaatcccggcccgggcggctggggggcgatactcagctataagggtgcggagaaggaactctccggcggcgcggcccagaccaccaacaaccgcatggagctgaccgccgtcatcgaggcgctgcggcttttgaaggagccgtgcgtggtggagctgtacagcgacagcaagtacgtcatcgacgcgctggaaaagggctgggccagaagctggcagcagcggggctgggtgaaaagtgacaaaaagccggcgctgaacccggacctgtgggagcagctgctggcgctgaccgatattcacgaggtgcgctgccactgggtgaagggccacgcggagaatgaaaaaaacaaccgctgcgaccagatggctgtggccgagagcagaaagtttcagtgaaatgcgctgtctgctgtggaaaaaacgcggcgtaaaaggcagaattcacaaattgttcatggccgcttcaagattcggccaaaattagagggtattatagcatcatccaaaggaacaacacttcctgatgtgattttctctctctcctaacacaaacacacggaaacaccccggccattcggccggggtgtttctgcttttttttcgctttcggcaacgtatgtttgcttgctttttggtttacgcagcgtttgcctggttgtcctctgcatgtgctgcttatgtgctcttttttatacgtttgaggcagtcatggtgtgcctttgtgttccggaaggctccaaagccctgtattctcaaaagacggagagaaaaaaggcgcacaaaaggaaacgaggctcagttataataatcggtctcgtcggtcagcgccatgggcaggccgttgtggtagaccggcagggtctggaatttgaagcggctggcccggtgcagggcgtcgatgcgctccttgatggccgggtccaccacgccgcggcggacgtactcgttcaccgcgcggtaggggaagcccagattgtcctcgtcggtcaggccggtgaggccgtcggacggcggcttgatgagaaacttctccggcaggccaagctgacggcccagggcgacgacctcctcggtggtgtacatccccaggggggagaaggcgccggcgctgtcgccgtagatggtgcagtagcccacccagtcctcgctgaggttgctggtgttgatgacgatgccgccctctacggactgggccacggcgtacagggtggccatgcggacgcggctgggcagattgacctttgtctggcggctgggggtcaggcccgctttttccatctcgttcagcacgccctgaacggcgtcgtggatgttgatggtggtgtggggcaggtccaggtgctgcaccagtgcctgggagtagtcgatgtccggctggacgccgtcgggcatgaggacgccgagcacgttctcgcggccgtaggcggccacggccagggcggccacggtggagctgtccttgccgccggagatgccgatgacggcggtcttgccgtggcaggcattcatctgctcggccatccactccagcaggccggccagctgtatctgggggttgaattccatatgcgatacctcccgttccgaagttttgatgtcctattgtaccgcgtcggggaggattttgcaagggctatcccagcagggccgctgcatcctccggcgtcaggccgggctggagcgccagggtgacgccatagccgatgagccggcccagctcacggacgcggcggtcgatgtcctggggtgtgacgaacaacccggagggcggggcgtcctcgtcgccgcagagggccgcgccgtcgatgaccgtggggacccccagggcgatgaccggcacgccaagcgtccgggcgttgaccgccttgcggtgattgcctacgccgctgccggggatcaggcccgtgtcccccagctgcacggtggcacacagccggtgacggctgcgggcggccagcgcgtcgatggcgatgaccaccgaggggtgcaggcggtccgccgcgccgcggaccagctccagcgtctccacccccgtgcgggccagcacgccggtggccagggccgccaccggcgtcagcgcgccgaactgccggggcatggaacggaccatgtgccgcgtgaccagcaggtgctccagcgccgccgcgcccacggcgtcgggggtcatggcgtcgttgcccaggcccaccaccagggcggggccgtccgatggcggcggcagcagggcgcggagctcgcggcacaggcagagggcggcccggccggtcagcgcctcctgacgggacagggcggggcgcaggtcgatggtgatatagcggccctcgggcttgccgatggcccgggcgcccgccggggtatggacatggatgcgggtgacgggacagccgcacagcaggcattcggacttggtgacgccggtgccgggggcgaaaatatcccggccggtgggcagcgcctccgctgtttccacggccagatcggtacgcgagaggttcatagtagtggtcaacgctcccttctgaacacaaaatattgtggcttttgggtagcatggccggtgaaatcgcttttatacaaaaactgccgcggaaattgcaaaaaagtcttgcatttttcaggcaaagatgctaaaatatcatcctgcgtggaagtgtatattttcgctgcacaaaaaattcaagtcggggaggtgtttggtttgccgaatatcaagtctgctaagaagcgtgttctggtggcagagacgagaaatgctcgcaacaaagccaataagtccgcactgaagactgctatcaagaagttcgaggctgctgccgttgaaggcaatcgcaccgaggccgagggcacttacaaggtggcggtcaaggcgatcgacaaggctgctgcaaagggtctgctgcacaagaacaacgcggcccacaagaagagcgcgctgacgctgaagctgaacaacattggctaatgaccaaacgcaacggacatccgcaagggtgtccgttttggtttatacgggaaaagggacggcggcgccgtcccttttttcatatccccttatacttgcggcgcgtggccattccgccgcggatgtgccgctgggaacggttttcgtccagtatggcctttacctgcgtgtacagcgcccggtcgcacagggccagacgctcggacaggtccttgtgtacggtggatttgctgacgccgaacttcttggcggcggcgcggacggtggtccggttctctatcatgtacagggccagctctttggcccgctgctccagatcgtctcgcataacgcaacactcccatgccgttgtgctctatctatatggcggaacgcgggcggatatgacaaagggaacggaccgcacatccttaacggacacttagcgggcggcgggagtataatttggcatcatccggagatgaaatgaggcgagtctatggatatttggaaggaattgcgggacgagggcgtggacagcggcctgctggaggaggtacgccgcttccgggaggcccaccccctgacgccggaggcacaggagcgcgtgcccgtgccgaagtatctctactacggcagggaggtatgggagagcgcggcggcggcgctgctgtgcggcgagcacctgctgctggcggggccgaaggccaccggcaagaacgtgctggcggaggacctggcggcgctgtttggacggccggtgtgggacgtgtccatgtatgtgaacgtggacgcggcggccctgatcggcgcggacacgctgaaggacgggcaggtggtgttccgggagggaccggtgtgcgcctgtgcgcggctgggcggctttggcgtgctggacgaggtgaacatggcaaagaacgaggcgctggccgtgctgcacgccacgctggaccaccggcgcgtcatcgacgtgccggggtatgagcgcatacagctggacgacgcggcgcggttcatcggcaccatgaactacggctacgccggcacccgtgagctgaacgaggcgctggtgagccggttcgtggtggtggatatgccggtgatctccgacgagaatttgcagaagctgctgcggcgcagtttccccaccctgaagcgggagtgggccgagcagctgacggcgctgttccgggacctgcggaccaagtgcgacagcggcgagatatccaccaaggcgctggacctgcggggactgctggcggccctgcacctgatcgagaaggggataccctccgggcaggcgctggacctgggcatcatcaacaaggcctttgagccctttgagcgccagctggtggcggacgcggtgtgggcgcgcctgcccaaggacgccacccgggataagctgttcgactgatatggacagacaggacagagagacgcgccgggcggaaaatcaggtgtggaacggctggggggactatgcccgcaagccggagctgctgaccttcgaccgggcgggggacgccgagctgtacggcaatacggtgctgggtctggcctgccggtattacgactttgaccgcttccggccgctgctgaacgagtttcaccggtcggcgcaggaggcactgtacacggacgtgttcttcctggtgctggagggggcggtgttcgcccgcggcgcggcggaacggccgctgctgccggcgctgcggcgggactatgcccgccggctgctggcgcagacgccgatggccgagggcatgaacggggacgccgtgcgccgggcctgggcctgccgcgtgctggaacagccggaggacccggccctgtcgccgctgctggacgagctggccgcgccgggggacagcacggaggcgcagctgatccagcggacggagcgcgtgctgtacacctggttccgccgcgcacgccgggctgccgacgaccgccagtgggcggcgtgggtaggccgaaagcgggacaaaagcggcggcgtgcactttgtgcggcccaacgccctgcgggcgctgtcacatgacgcgcccggcggcagcggcggcttgcagaagcagacgctgttcagctttttgcagggccggacgccggagccgatcctgcggcggtatgtggaggactgcttcggcgcgtccatgctgacgccggggcagctcagtgaggcggagcgcaccctgtgcaccggcgtgcacaagaactgccggctgcactttacccgcggcgagccggtgggccgcgcgcccgcgccggaggcggcctgggacgcggcccacttccggcagcagcgggagaagaaccgggcgtattaccgggcgcatctggtggaaaacaagctggccatcgcacagctgacgcagaagctgcagaacacgctgctgctgcgggcggaggacgagggtggtacgggccgcgccgggaggctgcggccggagctggcctggcgcgccagggcgctgggggacgagcgggtgttttcccgccggtcgccgcaggagccgggagagctgtccgtggacctgctgctggacggctcggcctcgcagaaccggcagcaggagaagctggccacacaggcgtatcttatcgcggagagcctgagccggtgccgcatccccgtgcgggtgacggcgttctgctccgtcagcggctgcacggtgctgcgggtgctgcgggactatgaccatccggagcagaacgagggggtattcgactatgtggccgcggggtggaaccgggacgggctggccctgcgggccatgggctggctgctgcggcagcggcgcagcgagcagtcgctgctgctggtgctctcggacgccagccccaacgacgaccagcggatacccaacggcctgggcggatgggcctacaccgggaagcgcggcgtggacgacacggcggcggaggccgcggccctgcggctgcggggcgtgctgccggtgtgtctgttcaccggaagcgaccgggaggtgccggacgcccggcgtatctacggacaggccatggagcgcctgccggccatcgggtggctggcagacgcggtgacgcggctgatccggggccagctgcggcggggataggacggtattcgacacaaaacgacagaaagagacacaccgaagggtgtgtctctttcgctgctcaataccaggtgatgccctccagatcctgtatctgcacccgcaggtcctccagcagtgtctccgcggcggcggagagggcgcggcccttgggtgtgaccaggtagaaggtgcgctccgccggcgggtgggccaggcgcagcacctgtacgttgttgaacatccgcagatacgactccgtggcgccggcggggatgatgctccagcgcttgccgccggcgggcagggtctcggccagttggggcgtgtcggcgtacagcagggggcgggcgtccacgccgaaccagtagtcgtgccactgctgtatctccggctggccgtagatgagtatctcgtcctgcacgtgcagggtggtggcctctaccggttccgtcagtgccaccgttctgggcaccacaaggaagaagccctcgcggaacaggggtttggcttcgatctgcagatcgtagtgcaatgcgccgtccacgatggccatgtccgcgtcgccccgggccacggcggacaccgcctggtccgtccgcatggactccacccacaggttcaccggcagctcacgctccagaaaccgctggtacaccggcggcagaatgtactggttggcggtgtaggcggcgatgacgtggagaaactcacgcttttccgcggcggcgaaggtctgcgtctccgaaagcaggttctgccaccggcgggccagaggcaggaagtgctggcccgcatctgtcagggtgatgcggcgctggcccttgccgcggtggaacaggggcgcgcccacctggtcctccagtgccttcagccgggcagacagggacggctgggtgatgtacagcgcctcggcggcggcggtcatggtgccgtggtccagcacggcgaaaaaggtctcgatgtcctggttggtcataggcggctctccaaattatagtttgtgtctatattataccgtagaataatcaattttacaagcaccaacctttgtggtatgatttgaccacaatacagaaaggagttgttccctatgacaaacacgaaaaccaagacttccccggcaaaggcgatcgccgctgttgtgatcgcggttattctggcgttcacgctggtgtgcctgctgacggggaacatcaaccccgtgtgccgtgtcaccgccatgctgatgccggtgtggctggccgccgagctgcgcctgctgtgcacgctgctgtaacggggcgccggctgattttgctgttttcttcccttttctctttcttatttgcgaaaaacgcggacgcaggtgcgtccgcgtttttcatcgtccggacgcgtaaagacggcgcaaagaatactacgaactccgaactatttttccgaaaaaaccctgtatttgtaacgctttcgtgaattctgcaccgttccgcttgcaagtcggcggcggggatggtacacttacacattattacagttttaccctgggcgcatgggcgctgcaggtggaaaaaggagggacggatatggccggcttcagcgtgaaaaaaccgctgacgatctttgtgacggtgctgggcattatcgtgctgggcgtggtggcgtatctgaaaatgacaccggatctgctgcccaacatggactttccctatgtcatcatcgtcacttctgatcccggcgccagcccggagtccatcgagcagtccatcaccaggccggtggagcagtccatggctacgctggataagatcaagaccgtcacctccaccagccaggacagcgtatccatggtcacgctggagtttgaggatggcgccaatatggataccatcagtgtggacatccagcagaagatctccgtattgcagggcagttgggacgacaccgtctccgccccctatgtgctgaagatcaatccctccatgctgccggtgatggtggccgccgtgacccgggaggacatggacgtgtacgcgctcagcgatttcgtcaccggagagctgtcccccaagctggagggcgtgtccggcgtggccagcatttcggtcagcggcgccgtgacccgggaggcccatgtgatcctggacgaggccaagctggatgccctgtcggagaagctggcggatgcggtgcgtaccgaactgaacaagacgaagctggatctgcagaaggccaaggaccaggtggaaaaggggcaggcacagctggatgaggccaaggaggccattgccgccggcgcggcggccaaggcgggcgcggcggtggataagctgtacgaatatctgaaagaggcccggggccagatcccggagccagacccggatccggatcccggtgagccgcccatcaccgtgcccgggctggaacagctgcaaaagacgctggaacggctgaacgcgacgctggataagctgatgaaggatctggaaagcggcgagctgaagcgggaggtcaccagtgaggtctataacatgacgctctccctgatcgacggcattacccagctgacggaggcgcagatacagctggatgaggccatgacccagatcgaggccggcatggaccagatcaacgaggcgtacaagtccatcgccgaccagacggacgtgggcgggatgctgtccatctccgccgtcagccagctgctgacggcacagaatttcgccatgcccgccgggtacattgaggacaacgacggcgtgcgctacatggtgtctgtgggcgagaacgtgtccacccggcaggagctggaggacatggtgctgctggacctgggcatggacggcatcgagccggtgacactgggcgacatcgccaccgtggtggtcacggacaacgccggggagctgtacaccaaggtcaacggcgacaacggcattctcatcacctttaccaagcagtccaactacgccacggcggaggtgtccaataacatcagcgcacggttcgaggagctggagggccagtacgagggattgtccttcgcgccgctgatggaccagggcgactatatctacctgatcgtggagaccatcacctcgtcgctgctgtggggcgcgctgttctccgtggtcatcctgtacctgttcctgcgggattggcggccaacggtcatcacgctggtatctatccccgtcagcgtgatctttgccatcgtacttatgtacttcaccggcgtgaccatcaacatgatctccctgagcggtctggccgtggcggtgggtatgctggtggataactccgtggtggtcattgagaatatctaccgcctgcgggccaagggcgccaccatcattcaggcggcggtgtccggcgcgggccaggtgctgggcgcggtgacggcctctaccctgaccaccgtgtgcgtgttcgcgcccatcgtgttcgtagagggcctgacccgccagctgttcaccgatctggcgctgaccatcacctactcgctgctggccagcctgctggtggcgctgacactggtgccggcgatggccagcggtatgctgcgccggcccatggtgcagaagccgggcctgctggacaaggtctatcccgcctatcggaaggccatcgctttttcgctggaccacaaggccggcgtgctgctgctgtcgctggtgctgctggtgaccagtgccggcgcgtgcctgcgccgcggctttacctttatgccggagatggatatgaacaacctgtccctgaccatcaccatgccggaggacacctcccgcgaggaggcggtacggctggccgacgaggtgctggagcgggtgatgactgtggacgacgtgcaggatgccggctttatgatgggcggcggcaccatgggcggcctgaacatgggcggtgccatgggcggcacctccggcggcagctatgacgtggagggctacatcaccatgccggaggggaccttcggctctgtggcggggaaggagatcgagacgctgtgtgccgacctgccctgtgaggtgacggccagcggcgtgatgagcggtatgatgagctatatgaccggcagcggcgtgtcgctgcaggtgttcggcagcgatatggcggacctgcagagcagcgcccggaccatcgcccggcggctggagcaggtggagggcgtcggtgaggtcagcgacgggctggacgcctcggccccggcgctgcaggtgaccatcgaccggaaggcggcggcggagaagggtctgaccgtggcccaggtgtatatgcagatcgccgcggcgctgcagagcagcgccagcgtctctgatgtgacgctggacagcgaggacatggacctgaccgtggacgcggcggagggcagcgtcctcaagcgggagaacctgctggagctggagttgtctgcggagagcagcgcgtcctccgccatgaccgggagcgcctcaggcatgaccggcagcagcgccgcggggcagctgaccggcggcagtgaggaggacaagaccttcaagttgggcgatgtggccaccgtgacggagacggtgtccatgaacaccatctcccgtgaccagcagcgccggtgcgttaccgtgaccgccgccatcgccgatggctacaacgtcacccacgtgacctccgcggcgcagcaggccgtcagcggtctgacgctgccggagggcgtcaccgcggaattcaacggagagaacgagcagatcatggaggccatgagccagctgctgctgatgctgctgctgggcgtggtgctggtgtacttcatcatggtggcacagttccagtcgctgaaatccccgttcatcgtcatgttcaccatcccgctggcctttaccggcggcttcctggccctgctgatcgcggggatcgaggtatctgtcatcagcctgatcggcttcgtgatgctggtgggcatcatcgtcaacaacggtatcgtgctggtggattacatcaaccagcagcggctgtccggcatggagcgccgggaggcgatcatcgacgcgggcgtgacccgcctgcggccgatcctgatgaccagtctgaccacgattttgggcttgatcgtcaccgccacggcgaaaaacgccggcacggcgctgatgcagcccatcgccgtggtctgtatcggcggactgctgtacgccacgctgatgacgctgttcgtggtgccctgtatgtacgacatgatgaacaagaaggacatgcagaaggtggacgagagcgaattgcagatcgtggatatgtgagcaaaaaaagaaagccccgcggggctttctttttttacgcttaataggccagcttctcggccagataggccttcagctcgctgatggggatacgcacctgctccatggtgtcgcgctcgcggacggtgacgcagttgtcgccggggtgctcggcatcgcccacggtgtcgaagtccacggtgatgcagaagggcgtgcccacctcgtcctcgcggcggtagcgcttgccgatggagccggtctcgtcgaagtccagcatccactccttggacaggtcctcgtagatcttgcgggcgggctcggagagcttcttgctcaggggcaggatggcggccttgtagggcgccagggccgggtgcaggtgcagcaccacgcggacgtcgttcttctccgcgtccacgacctcctcgtcgtaggcgtccaccagcacggccaggacgctgcgctccacacccagggacggctcgaccacataggggatgtagcgctcgttggtctcggggtcgaagtaggtcaggtccttgccggacacggtctggtgctgggtcaggtcgtagtcggtacggtccgccacgccccacagctcgccccagccgaaggggaacaggaactcgaagtccgtggtggccttggagtagaagcacagctcctcggggtcgtggtcacgcaggcgcaggttctcatccttcaatccgatgcccagcagccagttgtggcagaaggtgcgccagtagttgaaccactccaggtcggtgccgggtttgcagaagaactccagctccatctgctcgaactcacggacgcggaagatgaagttgcccggggtgatctcgttgcggaaggacttgccgatctggcagacgccgaagggcagcttgcggcgggtggtgcgctgggtgttcacaaagttggtgaagatgccctgggccgtctcgggacggagatagacggtgttcttggcgtcctcggtgacgccctggaacgtcttgaacatcaggttgaactggcggatatcggtgaagttgtgcttgccgcagctggggcaggggaggttgtgctcctctacaaagtccttcatctcctgctgggagaaggcgtcgatgggcttgctgagctcaaagccgttctcgtggcaccagtcctcgatgagtttgtcggcgcggaagcgctccttgcactccttgcagtccatcagggggtcggagaagccggccagatggccgctggccacccaggtctgggggttcatgaggatggcggcgtcctgccccacattgtaggggttctcctggacaaatttcttccaccaggccttcttgatgttgttcttcagctccacgcccaggggaccgtagtcccaggtgttggccaggccgccgtagatctcggagccggcaaagatgatgccgcggtttttgcagagggcgacgatcttgtccatcgttttttcggtgtttttcatggtgaggttcctcctatatgaagtgttttggcaacaaaaaaacgccctgagccggtaaggctcagggcgaactaaacatagtccgtggttccacctgaatttggatacttccacactcttctgccggtaacggggcttccggcgggcatttcctcccgcggctcagggccgccacgcccgtcatcgcctgtatcaggaaaagaatagcacgtttcggggtggttgtcaagcacgcaaagcaaaaaccgccgcagctgcggcggttttcggctgttttcggttacttcccggcggccatgacctttccggcggcgtccaccaccagacggtcggtctttgcgccggcggcgctcttgctgaagctcaccgtccacgcgccggaggtgacgtcataggtggcgtacacctgatcgtacgcgccggtgtactgggccttggccgcgtcgatggcggcctgctggctgacgctcttgcggccgatctgggcggtgcccagaatggacagcagcgcatcgcggttggcgttccacacctcggtggtcatggtctcggagggggaagccacatagctgcccggtacgtcctcaaaaaagatgtccgccatgcccatggtgcccttttccgtgttctcctccgtgtgctgccagaccttcatgccgttggcaagggtgatctcctcactggtgacgccggtgccgcagatgccgtagcctcccgtccagcacagcagcgtgtagctgacagtggggtcatcggtcttgtagaagcggatgccctcggtcttgtcggtgccgttgtcggacacctgctcccagctccagccctcaggcagctccagcttcatgtctacatagccgtgggtaaattcggcggtggtgacggtgggctggggatccggcgcgggatcggggtcgggcttgtcgtcgttgttctttttgccgcaggccatcagcgacagggcgcaggccagggccaggataaatgccaaaaacttcttcatgggggtcgtgcctccttttctgtctctatctgtttgtgtgtatatacaccgccggggggcggggagggcgatgtgcccgccctctatccactaagacggagcgcggcggggtttagttccgcttttcttattcgtgcccctcgggcagctgggcgatgacggtcttgtacagatggcggaagaagaacagcgtcagcgtcagggagaatacctccgcgatggggtagctccaccacaccaggtcgctgttgcccacggaggcgccgtaccgggccagcacgtaggcgatggggatcaggaacaccagctggcggacaatggaggtgatcatggagtacagggatctgcccagcgcctggaaggaggcgcccagggcgatgcacgcgccggccatgcagaagctgatggagatgatccgcagggcgggtatacccacggagagcatggtgtcggtggcgtcaaatatcttcagcagagggccggggatgacccagaagaggacggtgccgaagaccatgatgatagaggcgtacagcgcgccgcgcttgatggtctccaccatgcgcttgcggttccgagcaccgtagttataggccacgatgggcaccacgccgttgttcataccgaagacgggcatgaaaataaaggagttcagcttgaagtacgcgccgaaggcggtggccgccgtctcatgggcggcatggtaggtgatgagtatcttgttcatcaggaacgtcatcaccgaaccgatggcgatcataatgacgctgggcaggccgatggcatagatctcgccgatgagccggaagtccgggcggaagcccttgatggacagggtgatatcggtattcttcttgtggttgaagtatatggccagggcgcagccgcagaactggccgatgatggtggccacggcagcgccggtaacgcccatgttcagggtaaagatgaagatggggtccagaatgatattgatgatggcgcccagaccctgggtgtacatactgaggatagaccgcccggtgccctggagcagccgttcgtacatgatctggcagaacatacccagcgagccgatggtcaccacccgcaggtagtcgttgcccatgcggatgatgttctcgatctgggtctgggaacggaagaacaggtcggagcaggtggcacccaaaagggcggagatgacgaagcccaccagcgccagcagtatgccgtggttggcgaccttgtcggcgcgttcacgctgtccggcacccagtgcccggcccatcagggcgttgacgcctacggcggtgccggtggccagaccgatcatcaggttctgggcggggaaggccagcgaaacggcggtgagcgcctgctcgctgacacggctgacgaacacgctgtccacgatgttgtacagcgcctgcaccagcatggacgcgatgatgggcagggacatattccagatcagcttggaaatgggcatgacgcccagcttgttttcttcgggcaaggtatcactcttttctgtgcgaaatattcagtgtctcttattgtatcatgtatatccataaaaggaaatccccgaaatgcgctttttctgcacatttcgggggtgttttttgttgaaataacgcaaaattatttcgcgcagcgaagcagtttaccggcaggagaaaaaggcccggatctcctccgccgtgcaggcggcgctgccctgggcaaagccgtcgcggccgccgccgcggccatggagcgcgtcgttcatgtccttcaccagcggccggatatcctgtccggcatggatgagcgcgtaccggtacgtgccgtctgttccggagaacacggcgcagcggccgccgcacgtctgggccacggcgtcgcacaggcggcggacaccgtcgccttccagcggcgcggtgatgagcacggtgtcgcccttgccggcgtattccgccgctgtgtgggcgaagacctgcgcttccaatccggcggcgcgttccctggcggccagcagctcagactgcatccgctccacggcggcaaaggatgcctccggctttaccgacagcgattgcccgatctgccgggattgttcccagcaggcggagagatggtccagcgcccgctggccgcacagcagctccagccgcacgccgtcccggaatttctgccagcccacgaacttcaccaggcccacctggccgctggcggccacatgggtgccgcagcaggcgcacaggtccgcgccgggaaactccgtgaggcgcacaggcccctccagggcttttttgctgcggtagggcagggcggccagctcctccggggagggataccagatgtggatggggtggttttcccagatgtaccggttggcgcggcgttcgatgtcctgcacctgctcccagctgatgtcggcgttgtagtcgatggtcacggtgtctgcgcccaggtggaagcccacgttgtcgcagtggaaggcactgcacagcataccggagacgatgtgctcgccggagtgctgctgcatatgatcgaagcggcgcgcccagtcgatatggccgctgacctccgcgcctacaggcagctcatggtcgcacaggtgggtgacgacgccgtccttctcatggacgtccagcacgcgggcatcccccagcgtgccgtggtcggcgggctgtccgccgccctcgggatagaaggcggtgcggtccagcaccaccgcaaagccgcccgtcacagccccgcaggactccaccacggcggtgaagtcctgcagaaaggcgttttcatagtagagcttgacggtctccatcagtcgtccttctccacctcgcccacgatggcgatgtgcagctcatccagctgcttctgctccacggtggacggcgcgcccatcatgatgtcctgggcgttcttgttcatggggaaggggatgatctcgcggatggagctttcgccggccagcagcatgaccatgcggtccacgcccggggcgatgcccgcgtggggaggcgcaccgtagcagaaggcgttgtacatggcggggaacttctttttcacgtcctcctcgcccaggcgcaccagctcaaaggccttgatcatgatctccgggtcgtggttacggacggcgccggagctgagctccacgccgttgcacaccaggtcgtactggttggcgtagatgtccagcgggtcgatctcgccgcgctcggctttcagcaggatatccatgccgccgttgggcatggagaacgggttgtggcagaactccagctcgccggactcgtcgccgatctcgtacatggggaagtccacgatccagcagaactcgtagcgctccttgtcaaagtggttttcgcaggcggcgccgaaggtcttgatgagcacgcccacggacttggtggcgtattggcctgcggctgccagcaccagggtgcccggcttcaggtcgatgatcttgcccagctcggcctccaccggggcgacgaacttggcgatgccgccggccagctggccgttttcgtccaccttgaaccagtaggccttgctgccggactggacctcgcagtcggtgagcagcttctccacctgcttgcgggtcagggcgcagtcgctgatgggcaccatctttacggtctggcccttgaaggcctcgaactcgctggcgacgaacagctcgctgacgtttttgcaggtcaggtcgatacgcaggtcgggcttatcggagccgtaggtctccatggcggtgttgtaggggatgcggcggaagggggcggaggaggccacgttgtaggtgccgaacttggcgaagatagggggcagcacgtcctccagcacggcgaagatgtcgtcctgggtggcgaaggccatctccatatccagctgatagaactcgccggggctgcggtcgccgcgggcgtcctcgtcgcggaagcagggggcgatctggaaatagcggtcgaagccggaggtcatcagcagctgcttgaactgctggggcgcctggggcagggcgtagaacttgccggggtgcttgcgggcgggcaccagatagtcgcgggcgccctcgggggagctggcggtcaggatgggggtggtgatctccaggaagccgtgctccatcatggcggcgcgcagggcggccaccacctggcagcgcaggatgatgttctgcttgaccgccgggttacgcaggtccagatagcggtacttcagccgctgggtctcgtcggcctcgcggctgcggttgatctcgaagggcagggcgttgtagcggcagcggcccagcacctcgatcttggtggggaccacctcgatctcgccggtgggcagcttggagttcttgctggcgcgctcgcggacggtgccctccacgctgatggtggactccttgttcaggctcttgatgaccttcaggtcggcctcgtcctccaccaccacctgggtggtgccgtagaagtcacgcagcaccacgaaggccaggctgccgcctacctcgcggacattctccatccagcccacgatcttcacggacttgcccacatcggccagccgcagcgcattgcaggtatgtgtacgcatctgcatcattgtcgttttcctcccatttatgattgtgttttgtataaccttattgaattattacggattgtttatcaaaaacgccgccccctacacccgtctgccggaaatgctttgcgccgtagggtaaggcgcttacttctccacgatgaccctgcccttgttcctctcggccagaccgtcgcgcacccgcgccagggtggcggcaaagtccagggtggtctgctcgccgctggtcatatccttgcaggcgatgacgttatttttcacctcgtcctcgcccaggaacaccacatagggcacgccggtcttgtcggcgtagttcatcttggccttgaactttttttgctcggtgtacagttgggtccgcacgccggcgtcccgcagctttgtggccagtgtgacggcggcggacaggtcctcggtcatgggcaggatcagcacatccgccggagcggtgggcagatcgccgttgagcattccctgctcgcccagcacgtagaacagccgggtcaggccgatggagatgcccacgccgggcagctgcttgtcggtgtagtacgctgccaggttgtcataccggccgccggagcagacggagccgatctccgggtggtccagcagcgccgtctcgtacacggtgccggtgtagtaatccaagccccgggcaatggtcaggtccacggcaaagttctcctccggcacgccgaaggcggacaggtatttcaccacggtcttcagctggtccaggccctcgtcaaacgtttcgttccggccggcgtagccctccagggcggagagaacctgatcgttgctgccggtgatggcgatgaatttcaggatctcatcggcgctttcggcggacacgcccacctcgtcggtcagcagggcgcggactttctctgcgccgatcttgtccagcttgtccacggtacgcatgatgtcgccggccttgtcggtcaggcccagcatggcataaaagccgttgaggatcttgcggttgttcacccggatgcagaagcgcctgagccccagctcactgaacgcacggtagatgatggcgggcatctcggcctcgttggtgatgtccagcttgccgtcgccgatcacgtcgatatccgcctgatagaactcacggaagcggccgcgctgggcgcgctcgccccggtagaccttgccgatctggtagcggcggaaggggaaggacaggtcgttgtagtgcagggccacatacttggccagcggcaccgtcaggtcaaaccgcagggccaggtcggcgtcgcccttgttgaagcggtagatctgcttctccgtttcgccgccgcccttggccagcagcacctccgccgcctcgatcaccggggtgtccagcggggtgaagccgtacagagaataggtgcggcgcaggatgtccatcatgcgctccatctgctgctgcggcttgggcagcagctccataaagccggacagggtccggggggtcatctcagccattttccgtcgctcctttatcttcggtggtttcgttttgctcgtttgtctccggcagctcctccgcaccgggcgttagcgtgtgggcggcggcctcgcgggcggcctcggcctccgcctcgtgcttcagctcccaggcgacctcgcggtagatattatccagggcccggcccttcttcacgccgatgcgctggccgatgacaccgccgactatggccagcgccaggcccgcataccacagacccggtacaatgacaggcagcagcaggcccgccagcgcaccgaaccagacgcccagctcctcgcagtggccccggacggcgtggtaggcaccttttttctcccggaggtgcgtcattcgcttcagctgcgccaggcacataccgacccgcagcagcgccagcgccgtcagcgggatgaagatgtcccgcacgtggttgttgatgaagtccaaaacagcctgcatagcgttctcctttgtgtttgtgtcggcggcgcggacgaaaaaacgctcccgtccctgcattgggacgagagcgtaaaacacttcgtggtgccacccaaattcggccttgcggccctttttgctcctgttacggggagcgcgccgtggatgtttccatccccgctaactcgctgtcttcacctgtgccttgccgcggtgcgctttcagccgatggcgcacctctcttgcagcggcggtgtacaggctactcctgcgaggtctgcacggttatcccttattgtatgcgatttgccgatggttgtcaagccgtaaagggcttgttcttggggttgacgatgtcacgccagtccaggtcgccccggtccagacccagcaccagcatctcggcggtggccaggttgctggcaaagggcacgttgttctggtcgcacaggcgggaaatatacgtgatgtctgcgtccggcgttttctggttggggtcaccgaagcacagcaccatatcgatctcgttataggcgatgcgggcggcgatctgctgtccgccgccgtgggcgaaggacaggaagcggtgtatggtcagcccggtagcatcggcgatctgctggccggtgcgggcggtggcgcagagggtgtgcttggccaggatgccgcagtaggcggtgcagaactggaccatcagctctttccggttgtcgtgtgccatcaatgcaatattcatggagggctcctttccttatatcttcatcagcggggttttctgccccatgatgcgtttcgcaatgttttcataggcccgggcggcgtagtagttctgctcccgcagcaccagtccgcggttcaggcagtaggggacgtccgggtcctccggtatcacgcccagcagcggcaggcccgccgcgtcgatggcgtcgtcgatggtggtgtgcagctgacgcagcacctttttggacacgcgccctaccaccagatgcaccgtcccgctgggaaaggcggacagctctgcggcggtgcgctgggcgtcccgcatggcggacacgtccgtggtggtgatgacgatcacctggtcggccatgcacgctgccatctggaagccctgacccagtccggcgggcgcgtcgatcaggcaccagtcgtagctttcccgtatctcacgcgccagcgcctgcagcttcggcaccgacagggacagcgggcggtcggccatgggtgcggtcagcagggagagggaggggtatcgctcatggggcaccgccgcctcatgcagggtgcagcggccctccagcacgtcggagaagtccatcagcgcccggtcgctgagccccagcgccagatccaggttccgcagggtgatgtcacagtccaggcacagcacccgctgccccatgtgggccagcgccagcgccacgttggcggtgaaggtggtcttgccggtgccgcccttgccggacgccacggcgatgatcttgcccatggactccctcctttcacgggccgcctataccagcggcgcttttttgatccgggcaaaggcccggggaaattgcttcggtgtgtgctgtgttttttcgatggatacgatgcggtgcaccacgtccgtctccggcacggtgtagtccgtgacgccggagagctgtccgcccagctgggcgatggcgctgtgggcctgccgtatctcctcgtcggtggagacggacttcatggcggcgaactgtccgcctacctttaccagcggcagcgtcagctcgcacagtacgttcagctgggccacggcacgggaggccgccagatcgaactgctcccggtgctgcgcggcgaattcctccgcccgggcgtgaacgcaggtcacatttttcaggcccaggtctgtctggacctccttcaggaagtccacccgcttgcccagactgtccagcagcgtgaagcgggcgtccggcgtcaagatcgccagcaccatgccgggaaagcctgcgccggtgcctacgtcgatgacgcgcttgccggacaggtccagctgcgccgccagcgccgcgcagtccagcaggtgcagggtggcaacgtcccggggcgcggtgatggccgtgaggttcatcaccttgttcttttccagcagcagttcggcgtagcgcgccagcttgtccgcagcggcggggtccaggtccagggccgtcaggccggcggtcaggaggtccctcatttctgctgctctttcagcaggtcgcggatctcggtcagcagctcctcgctggtgggagccggttcttcctcctcctgcggctcctcgtcctttttgcccagcttgtgcagctggttgatggtcttgaccatcaggaagatgacgaaggccaccagaacaaagtcaatgaccgtgctcagaaacgtgccgatgcccagggtaacggcctcggtgaccacctggcctgcctcgtccagcacctccggcttcagaacgatattcagctgtcccagatccacgccgccgatgagcaggccgatcagcggcatgaacacatcgttcaccagagaggtggtgatcttaccgaacgcggtaccgatgatcacgccgacggccatgtccatgacgttgccgcgcatggcgaaggtcttgaattccgcaaaaaacttcttcatgtgtaaaagctcctatactaaaagtataattacggataactattacgatacgctatcagtgcagcggtaccaggcgctccttgccgcccatgtagggctgcagcgccttgggcaccagcacggagccgtccgcctgcaggttgttctccaacagggcgatcagcatacggggcggggccaccacggtgttgttcagggtgtggggcaggtacagtttgccgtcctcgccgcggacgcggatcttcaggcggcgggcctgggcgtcgcccaggttggagcaggagcacacctcgaagtacttttgctgccggggggaccaggcctcgatgtcgcaggacttgcacttcaggtccgccaggtcgccggagcagcactccagctgccgtacagggatatccaggctgcggaacagctccacggagtagcgccacatcttctcgtaccaggccttggagtcctcgggcttgcagaccacgatcatctcctgcttttcgaactggtggatgcggtacacaccacgctcctcgatgccgtgggcgcccttctctttgcggaagcagggggagtaggaggtcagcgtctggggcagcttgtcctccggcaggatctggtcgatgaacttgccgatcatggagtgctcgctggtgccgatcaggtacaggtcctcgccctcgatcttgtacatcatggcgtccatgtccgtctggctcatcacgccctccaccacgttgccgtggatcataaacggcgggatgcagtaggtgaagcccttgtcgatcataaagtcacggccataggcggtgacggcggagtgcagccgtgcgatgtcgcccatcaggtaatagaagccgttgccggatacacgggcggcggcgtccatatccacgccgtcgaagcgctccatgatctccgtgtggtaggagatggggaagtctggggtcttgggctcgccgaagcgctccacctctacgttgcagctgtcgtccggaccgatgggcacggactcgtcgatcatctgggggatgaccagcagcagcttgttcatggccgcctcggcgttggccttcttctcctccagccgagccatgcgctcggcgttggcctttacggcggcgttgttggcatcgatctccgcctgaagggcggccttctccgcctcgtcggcgcactttttcagcctgccgaacaggggaccgttggccttggagatcttgttgcgctcggccttcagggcctcgccctcgttgatggcctcgcggcgctcgctgtccagggcgatgacctcgtccaccaggggcagcttggcgttctggaacttcttgcggatattctcctttaccaggtccgggttctcccggataaacttgatgtcaagcatattctatacctctattcgatgatgtttcacgtgaaacgcttatcgctttcccagcttctccagagcctccagcagggcgttcaggtcctcggtgccgtagtattccagctcgatgcgccccttctttttgccgttgacgatgcggcaggggcggcccagcttttcgcccagctcacgggcggcctcctcaacataattgacggaaagcgcgtccttttggggcttttcttttttctcggcggtgagttttttcaccagcagttccgtctggcggacggagagggcgtccttgaccacggtctccgcggcggcctgctgctgtttgctgcccagcgtcaacagggcgcgggcgtgtccggcggaaagccgtccgtcctccaccatggcccgcaccggatcggtcagccccagcaggcgcagggcgttggccacggtggggcgggacttgcccacccgctgggcacattcgtcctgggtcatgccgtattgctccgtcagcacccggtagccctcggcctcctcaatggggttcagatcctctcgctggaggttttcgatcatggccagctccatggccttgcggtcgtcggcctcgatgaccaccacgggcacctgtgtcagcccggccatccgcgccgcccgccaccgccgttcaccggcgatgatctgatagtagccggattgcagcttccgcacggtcagcggctggatgatgccgtgtatccggatggagtccgccaggtcactgagggcctccggctcaaagctctttctgggctgggtggagcagctctccacctggctgatgggcagcagcagggaggaggcgcgctcgtccttggcggcgatgacgtcatcgcccagcagtgcgctcagtcccttgcccagaccttttgtgttcgccataccgcgtctcctttcagcagttgctcttccgcaaaaattccgccgccagcgccgtgtatgcgtccgcgccccggcaggtcttgtcataggcggtgatgggcttgccgtggctgggcgcttcgctgagccgcacgttccgcgggatcacggtgctgtacaccttcccggcaaaaaaccgcttcagctcctgggccacttgaatggacaggttagtgcggccatcgaacatggtcagcagcacgccctcgatgtccagccccgggttcatgctgcgccgcacgatacgcacggtgttcatcaggtcgctgagtccctccagcgcgtaatactcgccctgcaccggtaccagcagactgttggcggcgcacagcgcgttcagcgtcagcagttccagcgagggcggacagtcgatgaaaatgaaatcgtaattgtccgccacctgccgcagcgcggccttcagcaggaactgccggtcgtccatgttgatcatctccacgccggcgccggccagcgccttgctgcttggcagcacgtcgccatagggcgtggccacgatcagctgggccgtctctgcgccgttgatgagcgcgtcatatacgccgttgctggtggtcttgtccacgcccatgccgctggtggcgttggcctgagggtcaaaatcgcacagcagcacccgcttgccagcggcttttacggcagcggccaggtttacacaggtggtggtcttgcccacgccgcccttctgatttacgatcgcaatgattttcgccacagcaaattcctctttctatctgagttcattatgatagtatataccacctgcatggagggtttcaagagggaaaatgcaaattttcgcccttttgtttcacgtgaaacataaagggacaaaaacagggcggctgtttcacgtgaaacagccgccccgttccttataccagtatcacgccgttcagcggcggcaatgtcaggtgtgctttcccgtcgatgaccagaaatcgctgtccggttatcgcatcctgcgcggtgggcgcgtcccaggccagcgtcaggtctgccggcgcgtccccggcgttcagcgccgttaccgtgcgctcgcctccgcactcacgctcgatggccagagcgccgcctcgggccagcagatagcgcagggcgcccgagcgcaggctctcccgcgttcgccgcagctgtcccagagtgcggaagaagtccgtcagcgccgcgtcctcgctgccccaggggaaggcgccccggttcagggggtcctcgaagccctgcacgccggcctcgtcgccgtagaagagggtgggagagccggggaagctgtagagcagcattcccgccagacggagctttgccaggccccgggccagctcagtgggggagaggcggtacgccgcacgctccgccttggttttcggtgtgccctccgcgcccagcagcgtcagaatgcgcgctgtgtcgtgggtgcccaggaagttcatggcgccatagaaggcaaagggcgggtagttctcacgaattgtctccatgctgtcgcggaagaccgcggcgtcgccgccggccagccagttcagcagggccgtgcggaaggggtagttcatcaggccgtggacctggcggcccagcaggtatctgcgccgttgggagtaggcgatcttgttgctgccgtcctcccagacctcacccagcaggtaagccccgggcttttccgcgtcgatggccgagcggatgccctcaataaagtcgccgggcagctcgtcggccacatccagccgccagccgtccgcgccgcagcgcagccaatgccggaccacgctgtcctgatcgccgaagatgaagtcacggtaagccggctgcgcctcattgacggcgggcagggtcttcacgccccaccaggcgtcgtagtccgacggccacgggtggaagctgtaccagttgtaatactctgaattctggctctgggccgcccccggctccggatagtagccctcggcgttgaagtaccggctgttgctgccggtatggttgaacacgccgtccagtatcacacgcatcccacgctgatgggcggcggtgcacagggtgcggaagtcagcctctgtgcccagcagcgggtcgatggcccgatagtcgccggtgtcgtagcggtggttgctggcggcctcaaaaatggggttcagatacagcgtcgtcacgaccaggcccgccagatagtccagcttctccgtgatgccctgcagcgagccgccaaagaagtcacggttggtgatctgcccgtgctcgtccggaagggacaccggctgctcgttccagccgcggtgcagccaccggtgcccgggcatatggctcacgtccggcatggatacacggcggaaccgatccgggaagatctggtacgtcacgccgcgcccgaaccagtccggggcgggggagggctcgtataccgtcagctgccagcgtgccgccttctccggcgcgtcctgcacgccatttttgccgtaccacacgcagcgcccgtccacgtccgtcaggcggaagcagtaccagcacagctcaccgccagccggtgcggtgtatgtgccggcgaagccgccctccgccggcggcagggcgcacgtgtcctccgtgcctgaaaactcccggagcaccagcagctcgcagccgtagtaagtgtcgtccgccagcgcaaagcgcacttcggcgccgcaggggacggcgccgaagggatctttataatgtttgtctctcgaattgaaatagggtcccatgtgtgcctcttgtctctataacagatttaccgcatcagcgtgtcctcgccggcggcggtggcgccggtgccgtcccgggtgaaccaggcgttgatgatgtccacggccgcattggccagcagactgccgctgccgcccttctccaccacgatggcgatggcgatctccggatcgtcatagggggcgtaggccacaaaggtgccgttggcgatatccgtacccacctgggccgagccggtcttggcgccggcctccaccacacagcgggaaaaggcgctccgcagggagtcgtaggtcagatcgtgcatacccttggtcaccgccgccatggtgctgtccgagatgttcaggtcgttcagcggccccttgccatatatgtcgataactcgtgaattatcataagattttacgtttttcagaagatgtgcctcatagtgctcgccgccggataccagcgtagccacatagttggccagctgcaggggggtgaacaggttgtaggactggccgatggccgccgtgatggtctggccgtcggtccactcccggtcgtgggcctccgcccactccggggaggccagcacgccgctgacgtcgccgatctcaatgcccgtggactgccccaggccgaaggctgtggcgtactcgtccagcttcttgatgcctgtcagccggcccacctcgtagtagaagtagttgcaggagtccacgatggcctgactgacgttgatgcgcccgtgggtggtgtgggcctgccgccagatccagcacatgggctgcgggtccacatagtaggtgtagatacccttgtcttcgataatggtactgggggtgatgatgccctcctccagcgccgccacggacgtgcacagcttgaaggtggagccgggggcgtacacgccctgggtggcccggttaaacatgggcaggcgttcgtccttcaccagctcatcatagtcctggttgaacgtctccagatcgtaggtggggtagctggccatggccagtacctcgccggtgcccacctgaatgaccgccgccgcgccgccgcgctcgttgctgtccttgtcgatcatgccctgaatggtactggccagcgtgtcctccaccacctgctgcaggtcgatgtcgatggtcagcgccacggtgccgccgggctggggctcccgggtgtacagctcgccggtgatcttgccgttctcgtcggtggtgatgagccgcttgccgtccttgccgtggaggtattcctcaaaggccttctccacgccgtccttgcccaccaggtcattcatattgtagcccttgtcggcgtagcccacatagccggtgctctcgtcgctgcgccactcctcctgccatatggcgcccacggtgcccagaatgtgcgccgccagcttggtgttgtacacccgcgccgccgccgtcttgatggtcacgccccggtactttccgtcggtgatgcggcccagcagctccgtggatacatcctcggcaaaggtgtagctgctgcgcccgtccagttcataccgcacgcccacgatcagacgcgcctgcgcgttggtatagctgtcatcgaccttgtagagcttccgcatggcggccagcacttccgcgctgccgccgtccgtgggcagcttgttgtcgtccagatactcccggaagctcttggtcaggcttttgctggtcagctggggagaggaccctgtggtcatgggcagggtgtcgttccatgtgacgccctgctcctgacacagctgtatcagctgccagatggcgtcgttcagcgcggcctcgtccttgccgaagctgctcttgtctaccaccagcgtataggccagccggttgctcaccagcaccttgccattccggtcggtgatgatgccccgggaggcggtcaccgtttcgctggcggtgttgctggtgatggacctggcccgattttcgctgccgtgtaccacctgtgcgtcatacagcaccgcaaaaaacagcaccagaaacgcacagaaaaaccccagcagcacatatacccgccgccgggaggggtgaggatttttcatcatagcttggttctcctatggtcattcgctcagtgtccgccgccgtgcccaccggaacagcgggtgcgctgccgccgcgaagggcagcgataccaaaagctctctgcccagcagcaggcccgccgcggtcagccccgcgccgctgtgtcccgccagcaccgccatgtgcagcagtccgcagagcagcatacatacgcctgtcgccaccagcgagcacaccacgcccgccatgatgacctgcccgctcagcagccacgctgccgccgcgccaagcaggaacgccagcgcgtaaaagcacggcaggcccgccaccggcgagagaaggtcgcacaccagcccgaaaaataccgcgtacagcagcgcctgctcgttgcgctccagcgtggccggtatcaccgcgatggccggcagcaggaacgggtgcacgccccatacccgcacgtgtaccagaaccagcccctgcagcagtgccagcgccagcgcgcacagacagtacaatatccacttcagcagtatcacccgccgcgtcatagccgtcctccatcattggatcacgtcaaaatccgtgataataaacatctcctgtatcgccgccacatcgcatttgggcgagagcaccgcgtaccgtgccagcccgccgtcatccgtctgcacggactccaccgtgccgatgaccagcccggcgggatagtagccgcccagtccggacgtgacgatcacatcgcccttgatcaggctcgcgctgtcgttgaggtattgcagccgcagcctgccctcggccatcagggccaggtcaccgccggccaccgccgtctcgccggtgcggaatacccgcgcgccgaactgggaatccgtgtccagcaccgtggacagccggcaccagttcaggcccacgtctgtgaccacacccaccaggttcccggcgctgtccaccgcgcagtcgcctatggccacaccgtgctgactgccccggtccagcaccagcgtgctggcccagttggacacgtcgcgctgggtgacgcgggccgcctcgaacaccaggtcgctgcgctgctgccgcaggcccagcagctggcgcagctctttattctcggtcgccgccggctccatctgccgcagctgctcctccagctccgcgatctgctgccgcagctcatcgttctcctgctgtagggtctccacgtcctcaaaccgctggctaatgccgccgacccagcccgccacggcggaacccgccgcccggaagggcgaggcgatcacgcccagggcattgtgcagcagccccgttccggagctcagggccgacaccacgcacagcaccaccgcgatggtagccgccgcggccagcagccatattcccgttttcgtaaaaaatcgcttcatgtgtcgtttgttcctctctgaagtctcccccggcaggggaggcggcagcgcaccctctcagagggagcgaaaggggcattatcccagcagctgtatcccgaattcgcccagcatctccgccagcagcaccaccggcagccccatcacgttgaaaaagtcgccgtcgatgcgcgccaccagcagcgcgccctgcccctgtacgccgtaggccccggctttgtccatgggctcgcccccggcgatgtaggccttcagctcccgctgtgtggccggacggaaatacacgtccgtgtgctgggcacgggtcagggctttctccccctgccgcaccgtcacaccggtacagacggtgtggcgccgaccctgcagggccgtcagcatttgcagggcctccgcctggtcggcgggcttgcccagcttcttgtcgtccagaaacaccatcgtatccgccgtgatgacgatctcgtccgcgtcggacgccaccgcctgggatttctcccgggagatgtagcacaccgtctcctccggcgtcagcccggcggggaagtattcctccacctccggcacccggacggtaaagtcggtgatgcccatccgacgcaaaagctcctgccgccggggggacccggaggccagcacgatctttgccatatacgtcacctgcctgtggagccgaagccgccggcgccccggtccgtctcgtccaggtcctccgtcaccgtcaccgtgggctgcaccaccggcaccaccatcagctgggcgatccggtccccgggctgcaccgtgtacggttcgcttcccaggtttaccagccccacgccgatctcgccccggtagtcgctgtcgatgacgcccacgccgttggaaaggcacacgcccttcttgatgcccagcccgctgcgggcgaacaccagcgccgcgtagtccgccgacggcagggcgatggcgatgccggtgggtaccagccgccgttccccggctgccagcgtcaccgcctcgtcgatgcaggcacacaggtccatgcaggccgcgccggcggtggcaaagcgggggaggggtatctccgtcccgatcttgggggacagggccttgatcttcagctccatagtaacacctttttctcctgaaattgaatacggcttgtaaattataacgagtgttataccatttgttttactctacgccccggtagaacagcccgcgtgtgctgttgtcaccggcggtgacggtcccggccctgtgggcgcggagaagcgccgcgcactccgccgccgtctctgtggtaaaccgcaggcgtccgtaccgcaggccgcaccggaatacctccggcttgtccgccagcaccagcgtctttccgttctcgatctcgcaccggcacccgtaggcgcacagcaccgggaattgctcgccccgccggtcggtcagcacgctgcccgccccatgggcgcagcccacgctgttcttcgtcacgcagttttcggtgatcatcagcggcaggcggccatagacaagggcctcgcagtccgcatattttcccaggtcccgcacctgctgccaccgcagctcgaagctggccgtcacggacgatagcttctgctcctgccagaagcgcaccgcccggctgttgtacacgttcagaccgaagtcgccgcggagcgttttgcccagtcccttcacgatggccagatggcccaggttgccgatggccgcggaggcgacctccgggtgccgctgcagaatatcccggaacaccggttcgtccaccgtgcggaatatccggggcagcaccgcgcagaactccgcctgcccgatatagggcatcaggtccatcttatccagcagctccgccgggatatacacgatagcggggcgttccgccagcagctcggccgtcagctgatcgggcctgctgatggacacggtaaagtccagctccgccgcgcccgccggggcctccggcaggggagaggcgggcagttcacggcgcttcggagtgtccatccgccgatccgccagctcgtccagcagctcccgccgcagcgcgttcaccgcgctggcggacaccatcagcccctcgtccagctctatttcgatctgatccgccgcgaacaccgtgccgccggtcttggtcagccgctgccgcagctcctcctccgtcacggcgcggtttcgcgcctcctccggcatatcgcccgtggccatgactatggtgacgccgcccgggacggcgcacgcgccgctcagccgcaccggttttccccggcgcaccgtcagacggaggttcacaggtatctttcggttttcttttccgttttcgtatgtctcgcgggcgcgggcgaacagctcctttggctccggcacgttctccggccgggtgccgaacatggccttgcccttcctgcccagccaatagctgtccgtaaagccgctgcgggagaaggcctgctccagcgcccgggactcctccgccgtgggcagccgcctttcgtccagcaggcggcggtagatgcccgtcactacggccacgtattccggccgcttcagccgtccctccagcttcaggcaggccacgcccatgcgctgcatgtcctgcaaataggcggacaggttggcgtccttcaggctcaggggatgcgcgccccggcaggggccgttcacgccgtagggcagacggcagggctgggcgcaggcgccccggttgccgctgcgctgccccagcacggcgctcatctcgcactggccggagtagcacatacacagcgccccgtggccgaacacctcgatctccgcgccgcagccggcgcagatctcccgtacctcgtcccggtccagctcccgggccagcaccacgcgctccatgcccaacgccgcggccgcattggcgccgcccagcgtgaacaggctcatctgcgtgctggcgtgaagaggcaggtccggcacgatctcctttgccagggtcagcaggccccagtcctgcaccagcaccgcgtccacgcccatggcgctggccttccgcagcgacgcggccgccccgggcagctcccggtcggtcagcagggtgttcagggtcaaaaagacccgcacaccccgcagatggcaataccgcaccgccgacgcgaattcctcgtcggtaaagtttttcgcgctccgccgcgcgttgaacgcaccgaagcccatatacaccgcgtccgcgccgttctgcaccgcggcggtcagtgcctcatatccccccgcgggggccaaaagctccatcatcaccggcggttgttctggttctgggcgttctgcagcttccggcgcagctcggcggcctcgttcttagcgcggctggcctcgtccagataggtcttcacctgccggcgcagattttccgcgccctcctgcgccttggtgagctggtccgccagattgaccgccgccagcaccgccgccgcgtcacggctcatgtgggcgctgtccatcagcttctgcatctccgcatccaccatgctgccgatcttctccatgtaggcggcgtcctcctccgctacgaggatatactccgtgccgcagatagacatcgttacccggttcgccatgccaaaaccctccttaattcatttcgttgggtatatatacttatacaaatagcattataccacaaaacccgccggagaaaagtctattttggcgaaaagcggaaatttgtaaaaagttgtcccgccccgctttacgccgacccctttttcgtgtagaatggagagcacgaatgagaagggaggtcatcgccatggacggctatatacttcggaacaggcaggagcagctgacgctgtccgccgacgcggccgacaagctgctgcaaagcggtcagggcgacgccgccctgctgtatctggccctgcgccgcttcggccggggcgtcacaccggaggagctggaaaaggtcctgcccatcagccgcctgcggatcgacgcggcggagaaggtccttcaggacctggacctgctgcctcgaccggcccgccaggcaccgcccgatccggcggacgaacgcccggtctacaccgcccaggacatcgccggactgctgacggacaacgagggcttccgcctgctggtgccccagacggagcagcagctgggcaagaagctccgcaccgccgacttgcagatattggccggtctttacgatgacctgggtatgcccgccgacgtgatctatctcctggtgtgccactgtgtcgaacgggctcgcagccagtggggcgagggtagacgcccaaccatgcgccaggtggaaaaagagggctatcgctgggcacagcttggcatatttgaccagaattctgctgcggtatacctgaaaaaatgggcagagcgcaacaggaagtacacttcctatttgtcgaatttacgaattcttaacagaccgccggtggaggccgaacgccgctacatcgaccagtggatggacatgggcttcccgccggagacggtggctctggcctatgagcgcacggtgttctacaagaaggacctgaactggcgctatcttaacggcatcctgcgccgctggcacgacgccggctggcatacgccccgccaggtagaggagggcgaggcggccggcaagcggcccgctgccgccggtaagtccgccgcccccgccggggacaaggacgcctggatgcgccgctatatcaagaggtgagagtatgtcatacgacggtatcatcatgcagcgggccattgcccgctttgaccaggcccgccagcgtcgggaggccgagctggaccagcgccgccgggaggtctttgcccgccagccccgcctgcgggacatcgaccgcaccctccgcaccaccatgagccgcatcgtggccgccgccgccaaaaagggcgaggacccgctgcccgccctgcgggtcctgcgggacgaaaatctctccctgcagcgcgagcgcgccgccctgctggaggacatgggctatcccgccgactatctggaggacaagcccgcctgctccctctgcggcgacaccggctacacccggtccggcgtctgcgcctgcctgaagcagtactatgcccgcgagcagctggcggagctctcccggcttcttcccttgggcgaggcccggttcgacaccttccgcttcgacctgtacgacagcgccgtgtgggacagctacggcgtttcgccccgggccaacatggagcgcaacttcgacgtctgccgggactttgcccgccagttctcccggggcagcggcagcctgctgctctccggcggcaccggtctgggcaagacgttcctctccgcctgcatcgcccgggaggtcagcgacgccggcttctccgtggtctacgacaccgcgatcagcgttttctcccgctatgaggacgccaaattccgtcccgacgaggtcagcgatgccgacgtccgccgctgcgagagctgcgacctgctgatcctggacgacctgggcaccgagatgaccaccgcctttgtccagagcgctctctatcagatcgtcaacggccgtatgctctccggcaggtccaccatcatcagcaccaacctggccccggacgagctgggccgccgctatggcgcgcccatcctctcccgtatcgagggtgcctaccagatcctgcccttcttcggcgaggatatccgcacaaagcagtgaccgccgcacccgtcccgacaggggcgggtgcatttttttatttcccgacggtcttcgcccgctttcgacaggcctcccgccgtacaataggcgaaaaaaggaggcgaccgccatgaaaaaagaccagaagaccgatttcctctctgcccgtgtgcgatacatacccatcaacgatatccgtcccaacccccagcagccccgccgccgctttgacccggagagtttgcaggagctggcggccagcatcgccgcctacggcattctgcagccgctcaccgtccggcagcagggcgcagtctacgagctggtggccggcgagcgccgctggcgggcggcacggatcgccgggctgcggcaggtgccctgtctgctggcccgggtggatgaggaggacgccgctctgctggccctgatcgagaacctccagcgccgcgacctggactacatggaggaggcggccgccatcgcccgcctgctccgccgctacggcctcagccagcagcaggcggcggaaaagctgggccgcagccagtccgccgtggccaacaagctgcgtctgctgcggttggaggagccggtggcagaggctctgcaccgctacggcctgaccgagcgccacgcccgcgccctcctgcgtctggaggacccggagcagcgccttgccgccgtcgaacacatcggcaaaaaccagctgaacgtcgccgatgccgaggcctacatagaccgtctggtcacacagaaccagaccacgccgatccgccgccgcagcacctatatcctaaaagacgtccggctgtttctcaacagcgtggaccggggcgtccggctcatgcagaccgccggcgtcggcgccaaagtcgcccgccgggacacggaggacgccatctgcctcaccgtcaccatcccccgcgcaaagccgcagaaagatgtgtcgtaacgcttttgtaacccattccttgacaaaccgtgatacaatgcagtaacggcacggcattttgccggtattgcccaaacctgatgatacaaaggaggggacaccatgagcgacgagttgaatatgtcctctgttaccgccgatcccgcgccggagacggccggcaagcgcgcggccccggaagaaaagcctcccaagacccccggcaaaagagccggactgatcatcggcatcgccgcggcggtgctggtgctggcctacgcgggctgctgtgtggccgccaacgcgctgtattcccacacggcgtttcccaacacctccgtgctgggcatggatatgtccggcctgtcggcgcaggaggccgagcagcgctggacggagcaggggagtgccctgctggacggcatgaccatccgcctgacccgtgacgggcaggagatcggcagcaccaccctttccgacctgggcgtcaccgttctgcccgtctatgtctccaaggctgccggctgcgacgtgcaggaccggggctggggcagcgatgtgaccgcgttcctccgcggcggctggcgctttatcgagagctggttcagggccgtggatgtcacgccccagctggacgtggacgaggcgaagcttaccgccgcctgtgaacagctgtccgacaccgtgggctgcaccgtaacggacggcggctaccggctggcggagggtgagggtctgtacatcaccaagccgcaggacggcgagaagctggacgcggcggcgctgcgcgccgagttggtgcagcgcttcgagagccgcgacctgtccgctgcggcgcggtccgtggaatgtgtgttcgcggcccacaccgccgcgcccatggacgtgcaggcgctccacgacgagatcgccggcaccatggccgccgccatctgcgacaaatccaccggcaagcccacccagtcccgcgtgggcgtacagttcgatgtggagacggtgcaaaagcaactggacgtcgcccagccgggcgaggaattcctggctgacgcccaggtgcagttccctcccgccgccaccgaggagctggagcaggccatgttccgggacgtgatcggcacctgcaccaccacctgcgccggcccctggggccgccgccagaacatcaagctggcctctgccgccatcaacggccgtatctataaccccggcgaggagttctggtacaacgccactgtgggccagcgcaccgaggcccggggcttccagcccgccgccgcctactccggcggcaagaccgttacctccatcggcggcggtatctgccaggtatcctccacgctgtactattccgccctcatggcggacctgcagatcgtcctgcgctacgcccatatgttcgaccccggctatatgcccgtcacgggctgtgatgccacggtcagctggggcggcccggactttgccttccgcaacagcaccaactaccccatcaagatcaccaccagctacaacgacgagaccaaccagctgaccatcaccctgctgggcaccaagaccgacgaccactatgtggagatgaccaaccagttcctctcctactccgagcgcaagacggtctatcaggagtccgagcgcatcgcccccggcaccaccgaggtggaacagtacggccacaacggctacgccgtgcagacctaccgcaacgtctacgccggcgacggcacgctcctccgcagcaccaaggaggcgtacagcgactacgaccgggccgacaagatcatcctggtcgcccccggcgagctgccgcagtaaataaagaaacagccccctgccgggggctgttttctgctttcgctgtgtcttcgccgggagcagacagagaaaaagaccggcgaaagccggtcttttctttctgcgtatcattctctccgtagggcttcgatggggttcagcttcgatgccttcatggccggaaccaggccgaacaccacgccgatgaccatggagaaggccacggcgatgatgcacgccggtacgctgatggccaccggtgtccccatgatgtgggacatcatctccgccaggccgatgcccgtggccacgcccagtatgccgcccatgctggtcagcaccgccgcctccgtcaggaactgccagaggatgcggctctgctgcgcgccgatggcgatcttcaatccgatctcgcgggtgcgctccgtcacggacaccagcatgatgttcatcacgccgatgccgcccaccaccagcgagatagccgcgatccagatcaactgcttgttggtgctctccgacaggctctgcagatcgctggcctgctgcagaaggtccttggactcgtacttgtacttcgtggtccggatggcgttctcgttcagatacttggccacattgtcgccggcggcggtcatgtcgttggtgctggtggcccgcaccgccgcgtactggggttcatcataccggtacggtaccgaccagcatacgtccgggatgaaaatggtccccgctgtgctgccggcgtacatctgataatccttaaagctgttgatcaccggtccgctgctggaccgggaggacaccacacccaccacggtgaacggaatcccgttgatctcgatggtgccgccgatggggttctccccctggaacagcgactttgccgacttcgcgtcgataagcgccacattccgccggttctcatagtcccccgccgtgaaggagcgtccgtagttcaccgcgtagtccacggccgtcagatagtggtcgtccacgccgtacagcgacccgctgaacgccgtattgcccacatacacgttgtcgcaccaatcccgggagtagtacatactcaccagcgacacgctgcccagcttctccatctcatcccgcatctcccgggtcactgggtcgataccctccggcagcgccgagtagttcaggtcgaaatagttttggctgtccgtggcgccgatggtcacccgcaccacgttgttgcccgcgccgatcaggttctgcttgatctgctcgttggtgccctgaatggtggacacgatggtgatgatcgcggcgataccgataataatgcccagcatggtcagaaacgaccgcagcttgtggctccacacgccctgaaaggcgagatttatattttccaacatatggttatcccgcctcctttatatgccgtagttgtacagctggtcggccgtggcttcctgggtgtgggcaccctccaccacgtcgcgtccataggggaacgccacgtagtcgtcgatggtcagcccgccccgtatctgggtgtagctgccccacagatcccggccggtctgtacccaccgctgctccagtctgccgtcctcgccccgggccatcacatagctcttgccgttgtcggtccggatgaacatactctccagatacagtgaactgccgctttcttccgcgctggtgtccttctggtactgtatatccacatagtcattgggctgcaaattcgcatcctcggtgacaaacaccttgaaggggtagtaggacacgttactgttgccgtcgccccagttgttgccgttgctggtgggatagtcgtcgatggacacgatggtgccctcgcaggctgcgccggtcatccagctgctgatggatacggtgtcgcccacctgcacgctgcccagatccatctcgctgagggtgccggtgacgtaatatccgccgccgccggacagctccaccacggcctcgctgttgttataggcctcgtccgggtcccgtacggccttcaccgtgccgtcgaactccgcgtacacgttgccgtcgcccagctccgccagcttcttgtccagcttcagcttcgccaccttcaggttgacctcctgctcctttaccgcctgagccttctccagaatggccttgttcagatccagctgggtcatggaggcatccagcagctcctgcacctgtgccatctggcgctgcagcttctcgatctcggccttcttatcgccgtagtccggcgcgccgtcagtgaacggcttgaagccgttccacggcttgacggtcacagataccagctttttggccgttgtgccgctggtctcgccgccttcgccgccctcgccggtgccggcagggggctgctgcgggtcttgggtctcgccgccggtctcgccgccggtctcgccgccgctgggcacatcctccgtcaccgccgtcaggatatagccctcgttgcccatcacagctccgcccagcttgttgcctgcacgggtgacaaacaccagatacagcgtgccgtccgtcttgcccagactgctgaaaatgcgcatcaggtcagcctgcgacagcgcgaagctgccgtcgctgtccgtcgtgcggtagtagtagatggcgttgtccttgtcgttgccgctgccggtgcccagcttcatgtcgtcggtaatgatgatctgcttcagatccaccacgtccttgttgtcgtccgggctcttggtggcgtcctcaataagcttgttcagctccttttccagcttatcatactccgcctgcagcgtctccttgttcttcgccttcttcagcagctccagttcgttcttcatgacctccagattctccacctgccggtcatagtcgatcttggcgcgctccacggtggcctgtgtcagggtggagtcatagctcaccagcgccgtgcccttcttgacgctgtcgccctccttgacccacaccttcttcaccgtctggctctgggagatgtagattttctgcaatttgtccgtggtcaccatgccgctggtgttggaggtgtccccccagtagtcggtcatggcgaagtcgttgacggcgtatacgttcacgtcgccccgctgggcgttccgggcgatggtcagtccgccccacaccgcgccgcacacgcccaccacgcaggcggcggcgataatgccctttttcagcttcttgctcatgcgcggcttctcgccgtcggggcgcttttcgccgatatgcagcttttcccgcagcgtcagcttctcactcatagtcgtcacctcccgacagtacgccgtcccgtatggtcatgaccttggcggcgtggttggcgatggaatggtcgtgggtgatcatgatgatggtggagccgccgtcatgcagctgctgaaacagctccatcaccgccgcgccgctggcactgtccagcgcgccggtgggctcgtcggccagcagcagcttcggcttgcccacgatggcccgtgcgatggccacccgctggcactgtccgccggacagctggtccggccggtgatccacccggtcggaaagccccactgtctccagcgcggcccgggcccgttccagccgttccgccttcttcaccccgccgtacagcaggggcagcgccacgttctccaccgccgtcagcttgggcagaaggttgaagctctggaacacgaagcccagctccttgttccgtacctccgccagctgcttgttgttgcaggtggtcacgtcccgtccgcccagcagatagctgccgctggtgggcacgtccagacacccgatcaggttcatcagcgtggtcttgccgctgccggagggacccatgatagccaggtattccccctcctccacgtcaaggttcacgtttttcaggatatgtgccacggactttcccatggggtagtccttgcatatatcgcgcatttccaaaatcatggtcagccctccatcggcggaatgatcgccggcgcggaggcgtccgcgccgccgggaatcacggctgcggtgctgccgtcgtccgtgacggtgtcgttctcagcgggcatatcgccgccgtccatgccgtccatgggcacgttttcgtcgattttttcaccgtcgccctcggggtatacctcgccgccgctggcgccggggtcaaaggtgccctcgtcataggtgatgcacgtcatgcccgccttcaggctctcgtcgggataggcgatgtagtcctccgccgtcaggccgtccgtcacgggataggtgtccgtctccgtgttgtactcgcccagggtgatgctccgcttctccagcttgcccttgctgttctgagcccacacccagggcttgccctcggcgtcgttgatgaagtagctgggcaggttgatcaggctttcgtcctgggtgtcctcctgaccgtagtccggctctatgtacacgtgctggcccatcagcaggccctcgccgtcgccctccagcgtcacatagaaggggtacttgctggacatggccgtgtcgctgtcgccgtagtcgctgcgcgtctgctgggcgttgttccagtcgatggagctgatgctgcccttccacgtctggtcgctgacccgggaacggatgaccaccgccgtgccctcggtcagcacgctggcgttgttttcattcacatagcccttgatgcggaagccgcccgtctccacgatggtcatgaacggcagggcgttgccggagttgtccgtgccgccgtccgggttcagggactgtacctcgccgtccaccggggacttgacggtgctgtcggcggtgttggccttcagcttctcaatgtcctttttcttggtggcgatgttggccttcgtctccagcacctttacgttctgctcccgcaggtccagggcgtactgccgcttggtggcgtcgtcataggtgctgtccatcagcttctgtatgttttccagctccgcctgctggtcctccagcgtggcgttcagctgctccagctccagctgggccatctccaggtcggtgcggatctggctgaggtcataggtcagcagcacgtcgcccttttttacgctgtcgcccaccttcaccttgatggtgtcgatggtcatggcgtcgtttttcttgatggtcgtctcgcccagcgggctgacgatgcctgcgaaccggtccgccagacctacggaccccagcccgcagatcatagacaccgactgcacggaggcctcgccctccgctgcgccgcagccggacacacagcccagcagcatcaccagcgccagtacaaaagccgcttttttcatgtcgtgttctcctttttccttcccgcgcgcccgcgggatgatttgcctatttacttagacggcagaaattgtcattccgttccgccgctgtccccgacaatatcatatcatgcgcctggccctcaaaatgtgaacaaatcgtgaacacacgcttaagaccttactaaggttccgtatcaaaacggtggcaaaacgccccgcggaatattgacagcgtgcgggggagtgtcctattattatggtgttccgtgtccatcccggacatcttaccggtgtacgggcgcctttcgacggacacggtccgtgtatgataccaccggcaggaggttttgccatgaacaaaaaacgtatccgccagatggacctggccctgcgccgccgcctttccgaccgtcccgccgcggactattttgcccccggggacgccctgctccgcaccatcgagagcgagggctatatgcagcgcttcaccgggctgttcaacggcacgcgcctccgctgcgccgacgtgctggccctctgccgcccggagctggagacgctgtgccccggcgaaccgtccgagggctggctggcctatgcctacgactatgcccgccgcctgctctacccggaaaagaccgatgcggagcccttcgcccccggtgcggtgttcctgctgtcggtgctgcaggtgctgtttgccgccgaggcggagctgctgccccacgacccggcctggaccttcgatttcctgaccgatgatgagctggccggcagtccctgtgccccgtcctatcagcgcttcctgcgcctgtggaggcgggagttcgtctatgagctgatgcgtttgggcctggaggtcacgccctaccgcacccttgagcatatcgccggtgtccaccacctcgccgtcaccgccgcccgcgccctgcggaaaagcggcgtggccgtggacgtggccctggtctccggcgccgccgccggccacgatctgggcaagttcggctgccgccccggcgagcgcgtgccctacctgcactatttctacaccgaccagtggttccgccgccgccggatgaccgatatcggccacgtggccgccaaccactccgtctgggacctggagcccgactacctctccgtggaggcgctgctgctgatctacgccgacttccgcgtcaagcagctccacgatgcgcagggccgggagatcacacgtatctccaccctggctcaggcctttcaggtgatcctggataagctggatgacgtggacggcgagaagcagaagcgctatacccgggtctacgctcggctggaggactttgagcagttcatggtcagctgcggcgtggatgtcaccatgtccggcggcgatacgcccccgctgccggagaagcacaccgcccttatgaccgacgacgaggccctccgcgccctgacgctccgctgcgtgggccacaatatggagctgatgcaccgccttaccgaccagcgcagctttgcccgtctgctggaggaggcccgcggcgagacggattggcgccgtctccgcgcctatctggcggtgatggagtcctactccctctatctgcatatcccccagaaggtccagaccctgacgttcctctacgagctgctgatgcaccgcgagggcgatatccgccgtcaggcggcggcactgctgggcgagatcatcgccggcttccacgccggctacgccaaggagcgccccgccgacatccgcccggacccccgggccatcaccgacgtggaccagtggagactctatctggacaagatactgtatcccgaccataagctcatgccccagcaccgccgctggatcggctataccctgaaattcgccgtcggctccctgctgagccactgccccggccgggaggagcgcttcctggccccggtgttcgcctactaccgcaggccggaggatctggacgactacaccgccttccagctgctggataccgccgccgccctgccggatacggcctatacggccagccgcgcccggcagatgacggactttgccgccgccctgtccctgcgtaaggacctgaccatccgcatggccgccgtgctgctgctggaccgtctcgcccgcctgtacccggaggacggccgcgcgctggaggccgtgaccgccgtccccgacggcgacagcggcaccctgcgctatctcaagcaggatgtgctctctcagggtgcgccccttcttctgccggaggacgtggtctccgagatcttcctggacaacctgaagaccgccaccccctggatcaccaagcagggcaacctgcgcctgctgacggactttgcccgcagcggcaaaagccccgccctccatatcgccacccacctgtccaacctcatcaaggtcagcgaccgcgtcaccgtccgccacagcgccggcaacgccctgctggccctggcgccccgcctgacggccgaccagcgcaacgaggtggcggtggagctgtgccgcggcctggagctgggccagcaggagttcaccaaatatatccccgactacctgggccgttttgccctgtggctgcccccggcggagctggatgaggtgctggacgaccttcgcgtgaacctcagctcctccgacagccgcgttaccgcctccgtgctggataccgtgggcgtcatctatgaggcgtacgatgcctatcgctcccgcttcccggagacggacgacgcctaccgccgccgccgtgaacggctgctgggcctgctgatgcggggcctcagcggcattgacggcgccacccggcaggaggccctgttcgtgttgggccgccgggtcttcggctccggagagctgggccgccacgaaaagcgccgcgcctttatgctcacccagcgcaagctgctctccgcccaggacgaattccccggcgagggcctgacgttctactaccgggccgccatgctgggcaagctctaccgcttcatcaccgaggagcgcctgttccacaagggctttgacttcggcgcgccccgccccgtggccttcttccccggcaccttcgaccccttcaccctgtcccacaagggcatcgtccgggccatccgcgaccagggcttcgaggtcctgctggccattgacgagttctcctggtccaaaaagacccagccctaccgcctgcgccggcgcatcgccgccatggccgtggccgacgtgttccacgtcagcattttcccggaggacttcccggtgaacatcgccaacccggagaacctccacgagctgcgcgccgccttcccgggccgcagcgtgtccatcgtggtgggcagcgacgtggtgctccacgcctcgtcctacaaaaagtccgtcacgccggactccatccataccttcgaccacgtggtcttccgccgcaccgagccggacgccgagccggcggattacagctgcatcaccggcaaggtgctggagctgacgctcccgccccagctggaggagatcagctccacccgcatccgcgaggcggtggatgccaaccgcgacatctccaacctcatcgatcccacggtgcaggagttcatctatcgccgcggcctgtacctccgcgagccccaggacaagcccgttctccgcaccgaggacctgagcttcctgcctgcctcgccggagacggcggagaaattcctccgcaccatgctctccgcgcccaccgccgcggcgctgcggacgcagatcgagagccgcggcgacgacgtgatggtctgccgggacaccgacggcaccattctgggcgcggccagctacgcctgcctggactccgcccgcctcttcgcccgcctgggcgacccggccctctccggtctggtccgccagaacgccggcggccgcaccctgctcatcagcgggctgttcgtgccccggggcgagcgccagagcgacctctgccagctgctcatcaccgaggtgctgaccctggccctcagccgtgagttcacctatgccctctaccttcccctggagggcgccgtctccggctacggccgccagctgctgacgcttcagggcttcgtcccggctggtgacagcacggacgccctggccgtggatatgcgctgccccatcgtcctcagccgcaacgtggacaccgcggtgaaggcgcccttcagctcctcgccccgggtgcttgccgccatcgccgccgcccaccgccgcctgcaggcggcgctgacaaagctgcagcccggatctctggtgctcagcctgtccgccggcgtcatctaccaccggctgctccagcgtatcaccggccgcaacggcgtccccgcggagcccaccacgccccgcgtcctcggcccggatatctgcgtcccctacggcaagatcctccgcggcgtggccgtgcccaacaccgtcaccaagaccctgcgtaccgacaaggtctacgagccggacctcagcacctattccatcgaagcctacccggactactcgcccctgcccgaccaggtccgcaccatccacgccttcgcccgccccgtcattctcgtggacgatatgctccacgacggcaagcgcatccgccgcctggccccgctgctcgccgagacgaacacccccgtggatcaggtgctggtgggctacctcaccggcatgggccgcgatctgatggagcagctgggctacgacgtggacgccatctactacctgcccaacctgcgcctgcgcttcgtcgagtccacgctctatccctttatcggcggcgataccgtccgccgcagcgaggccctgcccggcggccttcagcccgccgtcaaccgcatcctgccctacgccgcccccgagtacaccggcatggacgacgagaccgcctgggagctctccctctgctgccttgagaacgcccgcgatatcctcctggcccttgaaacggaattccgttccctctacgcccgcaacctcaccctcagccgtctcggcgaagcggtcatcctgcccctctgccccgacaagggcggctgcatgacctacgatctctcccgcgccgccagcacgtatctggagggagatatagagctcctgaaacgtatgcgccctgcgagataatgcaccgtcttttccgccctgccatcgtcaaatctcctcgacgtacacacggtacgccttcgtcggtttgccatcggcaggacgcaaaatccggcacattctctattcctcaagggggggcctgcgcctccgcgcctcgtcttgacacaaaatctgaacctttatcaaggctatgcggcgccgcctcgtcaccggcaggacgcaaaatccggcacattctctattcctcaagggggggcctgcgcctccgcgcctcgtcttgacacaagatctgaacctttatcaagactatgcggcgccgcctcgtcatcggcaggacgcaagatccggcacattctctgctcctcagggggcctgccgtggcgtgaaatttgcgcgtcagcaccccgccggaggcaaaaagatagaaacaggagaagctactatgatcgatctcaacgatatcgccctgccgcgcatcccgtctaagtgccgcgtcaccctgctggctctgggcgatgtgggcagcacgctgctgacgggcctgcggctcatgggcggcgacgtgataggctccatcggcatctgcgacgtgcgccccggcgtttccgaccgctgggagttcgagctgaaccagatacagtccccggacggtgcggcgctgcccccggtggacatcatcgcgccggagcagctgttcgacggcgacgtgttcctgttctgtgcctcccggatgatcccggatacctccgtcacggcgggggatgtccgcatggcccagtacggactgaaccgggagctggtgtccgtctacgcccgtatggcccgggacaggcggtacaggggcctgttctgcgtggtcagcgatccggtggacccactctgccgtgccgtcctgcgtgaaagcggcctgtccccggcccaggtccggggcttcggtctgggcgtcatgcacgcccgcgccctgtactacgcccggagggaccctcgcttcgcgtcctacctcaccgagggccgcgccttcggcccccacggcgaggacctggtgctggccaactccattgcgcactacgacgacgccctctcccgtgagttgacggagaaggtggcccacgccaatctggagatgcgtaagctgggctacaagccctatgtggccccggccctgtcctccggcgcgctgagcctgctggccctgctgcgggggcagtggcattattcctccgtctacgacggccaggtgttcatgggctgccgcaatcgtctgacccccgccggcatcgagacggagccgctgaccctgccgcccgccctgcaaaagcgtatcgacgacacccgcgccaagctgaacgccatagaataacggaggtatccgccatgctcaccgttctgctccccgaaaacgaccgcagccccgccctgcgggacctgctggtgcccctgctgcctccgggcagcgatatccgcgaccccgatgacgggctggaggacctggccggccgccgtctgctgttcgctgtggcgctggacgagggcggctgcaatatggcctattaccgtatgctctcccgcctgcgccgcagcacagacctgctctccgacagtatcggcgcgtgcatcgtcaccggcgtgggcgagttctacaccaaggatgtggcccgggacatggtcttcgccgccaaccaggcgggctgcggcttcctcggccgcccactggtggaggccaccggttccctgcggaatttccgcacccaggcccagatcggcggcaccgatgaggtcacggccttccatgccgctgtggcggagctgctctcccgcctgaacggctgggaaaagcccgcccccatccgccatgtgctggctctccacgcctcccagcgcgccacgtccaacaccctggccctgtgggagctggtgaaggccggtcttccgtcggacatggaggtgcaggagatctgcctccgcaacggcaccatggccgactgcaacgggtgcagctataccgcctgtctccacttcggcgagcagggcggctgcttctacggcggccccatggtggacgaggtctatcccgccgtgcggaaatgcgacgccctggtcatgctctgcgccaactacaacgacgccctggctgccaacctgaccgcctgtgtcaaccggctcacggccctgttccgccagacccgtatgtacgacaagcggatcttcggcctgatcgtctccggctactccggcggcgacctgctggcccgccagttgatctccgccctgaacatgaacaagtccttctatctcccgccccgcttctccctgctggaaacggccaacgagcgcggcagccttgtgaagctgccgggcatcgaggcgcaggcggcggccttcgcccggcacatcgcggagagctgaataaccccgccgcaaaccggggaaaatacttccatcaatcaaaaggaggtgtgttccatgcaggcaatggtgttggagaaggcgtgcatccagtgcggactgtgcgcggggctgtgcccggaggtgttcgagctgaacagcggcgagcccgcccgggtgacggtggaccctatcccggacgcgcagaagatcggcgtgcaggaggcggcggacagctgtcccgtggccgccattcaggtaacggcgtaaaaatccccggaaatgccgcaaaaaccactttacaacggtgattttctgtggtattatctcaaagtacgcgctaagcgcgtccgacccctgccctagccctgcggagcgttccatctctcccacggcccaggctgcgggcgtatttcaagaaaggtggaaacacaaccatgatgctgaaagaccagaagacctctatcatcgaggccaatcgcacccacgagaccgacaccggctcccccgaggtccaggtggccattctcaccgagcgtatcaaccagctgaccgcgcacctgaaggtccatccccatgacttccacagccgccgcggtatgcagatgatgatcggtaagcgccgtcgtctgctggactacctggccaagaaggacatcgagcgttatcgtgccctgatcgccaagctgggtctgcgtaagtaagttgaaacagggtgatgtgcgcttgcgcatcacccttctttcacattctgcgccgtgtacaaattgaccattagcagttgaaaatgcgccgaaattcagggtttcggagcgttttcaagtgctaacggcgataggtcgcgggcagaatgccatttcacaaaaaaggagaaacgatatgtcaacgatcatcaccaagcgccagttcccccactatcacaaatacaccatggacctggccggccgtcccctgacgctggaggtgggcaagctggctgagctggccaacgccgccgtcatggtgggctatggcgacacccgcgtgctgtgctgcgtcaccgccgcgccccgtccccgcgacggcatcgacttcttccccctcagcgtggactttgaggagaagatgtacgccgtgggccgcattcccggcagctttaaccgccgcgagggccgtcccggcgagaagggcatcctgacctcccgcgtcatcgaccgccccatccgccccctgttcccctatgacttccgcaacgacgtgtccgtcatgtgcaccgtcatggccgtggaccacgactgctcccccgagatcgccgcgctgatcggcacctccgccgccctggccatctccgacattccctggaacggccccgtggccgccctgaaggtgggcctggtggacggcaagctggtcttcaaccccgacagcgagcagcgcaaggtcagcgacctggacgtcaccgtggtttccaccggcaagaaggtcgtcatgatcgaggccggcgccaacgaggtccccaacgatgtcatgttcgaggccatcaagcaggcccacgaggagaaccagaagcagatcgccctcatcaatcagatggtggccgagatcggcaagcccaagttcgactatccccacgccgacttcaactacgagctgttcaacaagatcaccgccgacttcatggacgaggccaaggccgccatggacaccgacgacaagaacgtccgcgagcagcgctggaacgccatgatcgagaagtggcacgagaagtacctggaagagtaccccaacatggaccagtacctggaggagatcacctacaagttccagaagatgatcgtcaagaagtggctgctggagggtcaccgtgtggatggccgtcagaagaacgagatccgtcccctggacgccgaggtgggcgtgctgccccgcgttcacggctccggcctgttcacccgcggccagacccaggtcctgtccgtctgcacgctggacactctgtccgccaaccagaagctggacaccatttgggaggagaccgagaagcgctatatgcaccactacaacttccccggctactccgtgggtgaggccaagcctgcccgcagccccggccgccgcgagatcggccacggtgcgctggccgagcgcgccctgctgcccgtcattcctcccgtggaggagttcccctacgccatccgcgtggtcagcgaggtcgtgtcctccaacggctccacgtcccagggctccatctgcggcagcaccctggccctcatggacgccggcgtgcccatcaaggcccctgtggccggcatctcctgcggcctgatccaggatgacgacggctccttcaccaccttcatcgacatccagggcgtggaggacttccacggcgagatggacttcaaggtggccggtaccaagaagggtatcaccgccatccagatggacctgaagaacgacggtctgaccatggagatcatcaagaacgcgctggacatcacctacgatgcccgctgccagatcctggaccaggtcatgctgccctgcatcgccgagccccggcccgaggtcagcaagtacgcccccaagatggtcaccatgcacatcgacccggataagatccgcgacgtcatcggcaagggcggctccgtcatccagaagatcgtggccgagtccggcgccaagatcgacatcgacgacgacggcaccatccacatcgcctcccccgatgccgagagctgcgaaaaggccaagaagtgcatcgacgacatcgtcttcgtgcccgaggtgggccagctgtactacggccgcgtcgtgcgcctgatgaccttcggcgccttcgtggagctggcccccggcaaggacggtctggtccatatctccaagctggccgacaagcgcatcgagaaggtggaggacgcctgcaagatcggcgacatgatgtgggtcaaggtcacggagatcgacgaaaagggccgcgtgaacctgagccacaaggacgccatgaaggagatctccgccaaggaagccgccggcgagcccatcaagtaaagcatcgttttttatatcccccggtccgccgggggatatttctttttcccgccgcctgtggtatactgaaaaaaacaccctgcaaggaggtcccgcctatgtccgacaacatcgccgccatcgccacgcccggacagcccagcgccatcggtatcctgcgcctgtccggcccggatacctgtgccgcgctggacgcggtgttccgcgccaaaaacggcaggcccgccgcgcagcagcgcccccgcgccatggtgctgggcgagctgctggacgagacggggcaggtcatcgacagcgtgctgtgcgtccatttccccgcgccccacagctataccggagaggactgcgccgagctccactgccacggcagccccatcgtgctggacacgggcctccgcgccctgtttgccgccggctgccgccaggccggtcccggcgagtttaccaagcgggcctttctcaacgggcagctggacctgctccaggcggagtccgtggcggacctgatcgacgccgagacggcccagcaggcccacaacgccgtctgccagctggacggcgcgctgagccgcaccgtggcgcgtatctacgacggcctcatggacatggccgcccggttctacgccgtggtagactatccggacgaggacatcgaggatctccaacgcgagcagatgctggacaccctgcgccgggcccagaacgatctggaagcgctggtggccgggttttcccgcggccgtttgctgaagctgggcgtgcccacggtgctgctgggcaagcctaacgccggcaaatcctctctgctgaacgccctcctgggctatgaccgggctatcgtcaccgacatcgccggcaccacccgcgacacggtggaggaaaaggtcaccgtgggcggcgtgctcctgcggctcatcgacacggcgggcatccgcgacggcggcgacgccgtggagaccatgggtgtggagcgcagccgcgccgccgcgaagcaggcatctctggccctgctggtgctggacggctcccgggagctgacggcggaggacgaggccgccatcgccctggccaacaccgtcccccacctgatcgtggccgtcaataaatccgacctgccccgggcgctggacgtcggcgccctggcggaccgcttcgacaacgtgctgtccgtctccgccatcaccggcgcgggactggacacgctgaccgacgccatcgcggcgcagttcccgtcgggcgagactgccggcggcgcgctgctgaccaacgcccgtcaggccgacgccgccaaccgcgccctctccgccgtggccgaggcccgcggcgccctccgtatcggcatgacccccgacgtggtgctcaccgactgcgaggcggcactggccgcgctgggtgagctgaacggcaaacaggtccgcgacgatctggtggacaccatcttctcccgcttctgcgtggggaaataggcgatagacacctgtatttctgctaatattccgtattatttacaatttggctcttttcctgcggcggttttcatgctatgatagcggggaatatcactcccaaggaggtttatcccatgcgcgaatatgtcattatgaccgacagctgctgcgacctgaccgaccacatggccaaggagctggagctgaccgtggtgcccctgaccgtccacatcgatgggcacgattaccctaacctgctggacggcagcgccatcagcttcgaggatttctacggcaagatccgcggcggtgtgctggccaccacctccgccgccaacgtaggccagtttcaggaggccatgcgccccattctggctgacggcaaggacatcgtcagcatcaacttctccagcgccctctccaccacctaccaaagtgcgtgcatcgccgcccaggacatgaaggaggagtttcccgatgccaacatctatgtggtggactccctctccgcctctctgggccagggcctgctgctctatctgaccgtccagaagaagcgcgagggcctctccgctcaggagctggtgcagtgggtggaggacaacaagctccacatcgaccactggttcaccgtggatgacctgaactacctgaagatgggcggccgtctcagtgccggcgccgcgttcttcggctccatgctctccatcaagcccgtcatgcacacctccgacgagggcaagctggtccccgtcagcaaggtccgcggccgcaaggccagcctgaaggccctcatcgacaagatcgccgagctgggcatcgagcccagcgagcaggtcatgttcatctgccatgccgactgcgaggtggaggcccgcgccgtggccgaggagatgaaggcccgctacggcgtcaaggaggtctacatcaactacatcgggcctgtgatcggcagccacacggggccgaataccatgggcatattcttcgtaggcaccaagagataacggcgcgtctcttgcgccaatacttcgttgcggcggcttgccgtacacaaagtacgcctgcgccgccgcgcctcgtcttggcgcaagatccattgccgttagaggtttgtcatcgacgggacacaagctccgtcgccgctggcggtgtacggtgcatttcaactttgcgggaggtcatcctatggactggctggaactcaagatcgacacgagccacgcgggcttggacgcggtgacggaaatgctggagcagcagggggtcaccggcgtgatgatcgacgacgaggcggactttcagagctttctggagaacaaccgccaatactgggattatgtggatgacgacctgctggcgcagaagaagggcgtcagccgcgtgacgttctatctggaacggaacgaggacgcctacggcaccgtggccgccgtgcgtatggccatgtcggcgctgaaaaaggaccacccggagtacgcgcccctgctgctgaccatggccgacgtggccgacgaggactgggagaacaactggaagcagttttacaagcccatggagatcggcagccgcctgctggtggtgccggagtgggaggaggccgccgaccccacgcgggtgaagctggtgctgaaccccggcctgaccttcggcaccggcagccacgccaccacccgcctgtgcctgcaggcgctggatacgcacatccacggcggtgagcgggtgctggacctgggctgcggcagcggcatcctgtccatcgccgccctgcgcctgggcgcggagagcgccttcgcctgcgacatcgacgagaaatgcgtggacgtggcctacgagaacgccgccctgaacggtatcggaaaggaccgctacaccgtccgctggggcgatgtgctcaccgacgccgccctgcggcaggagatgggcgccggctacgatatcgtggtggccaacatcgtggcggatgtcatcatgggcctcagcccccacgtccgtcctttcctgaagcccggcggccgcttcctctgctccggcatcatcgacgaccgggcggcggaggtgctggaaaagctgaaggccgacggctgggatgtgttcgagcagcgcagcagcgagggctggttcagctatctctgcaagtaacgcaaagaaaaagatcggcgcggagctgccgtctcggccattacagcacacctgctgcatctctgtggataacgacaaaaaaaagaccggcgcgggccggccttttttgcgcttcgcctgtccgcgccgccgggaacgggagaattcacggaatgtacttttctttttcctgaaaagttgctatactgaaagcaaacgtaacatatagcgaacgcgaatgtatacagcaaaagcaacggaaagtaaacgaaagtaaaggagaaaaccgaagccatgatgaagcgaattctgcgcctgacggcgtttttgctggggtcgacgctgctgctgtccgcctgcggcaatacaaaaggtaaagagatggtggacgcctccacccagaccgccccgcccgtagaaggcgtcaccgccctggccctgtgcgacggcgatgtgaccctccgttttgaaaaggacgaaaccggcgcctggacctggtttgacgaccccgccttccccctggaccagacggcgctggaggacctgctggccctgcccgccgccctggacagcggcgaaacggtggccgatgtgcaggagctggccgtctatggcctggaggctcccaagaagtacatcaccgtcacctccgacggcgtggacgtcgtctattatctcggcgaccaggccgcggatggccgctggtatgtactcacccctgccggcacggtgcgctatacctctgacgaaaataagatgctgctcagccgcagcatctacgccatggcggtcctgcccgttctgccggtcatcgagccggacaggctggtcagcgtaagtttgctgcgcgccgacggcaccgctgctgtctccttctacaccgccgaggacggtacccgccgcagcgccaaccgggacgtcacggaaaagaccgccgccctggctgatgagatcgctgccctgacgctcaccgcttgcgtggactacgacccggcggagggtgcggccgccgtctgcggcctggacacgccggaggtcacgctgacggtgaactacctggctgacaacagcgccgagcggacgctgatccttgccgtcggcctgtccaccggcgacggcggccgctatgtggccctggacggcgacaccaccatctaccggatggaggagtcgtccctgacccagatcctgaccctgtccgagacggggctgtaagccatgaaaagggaggcgcggctatgcgtatactgatcgtggaggatgaaaagcgcctggcgggcaccctgcaggacctgctgcgccgccagggctataccgccgacgtgtgttatgacggcatctccggcctggacaacgcccgcagcgatatctacgacctgctggtgctggacgccatgcttcccggcattgacggctttaccctgctgcgccagctgcgcggcggcggcagccgcctgccggtgctgatgctcaccgcccgcagtgagctgaatgaccgcgtccgcggcctggacgccggtgcggactactacttgaccaaacccttcgagccggaggagctgcttgcctgtatccggtccctgctgcgccgtggcggtgaggacgccgctgccgacccggaggtgacggccttcggcgacctgacgctgcatatgggcacattcctgctggaatgcggcccgcgaagcgtccgcctcagccgccgggagtacgacctgatggagctgctgatgcggaacggcagtcagatcgtctccaaggagcagctgatcctgaaggtctggggctacgactccgccgccgaggacaacaacgtggaggtctatatctccttccttcgccgcaagctcacccatctgcaatccactgtgaagatcaagaccctccgtatggtgggttattgtctggaggtggaggcatgatccggcaccttcgctggaaggtggtggccaccaatatgctactgatctcgctggtgctgctggcggtgttcgcggcggtgtacttcatctcccggggcaactatcacaagaatgtgcagcagcagctgtatcaggcgctggagcagggcgactatggccgcagccagcccggcatggacagcatcccctgctttgtggccgaggtctatggcagcggcaccgtccgcgtggccggcaacagctactatgacctcagcgacgagacccgcatggcggagatcgtcactgccgccctggcggcggacgaggacgccggcacgttggacgaatttcatctgcgctacctgcgccagcggggctacaccactactgccattgcgtttaccgatacctatctggaatacacctccctgcacacactgctgaaggcctgctctctggtgggctgcggcgcactggtggtgctgtttctgtgcagctacctgctctccggtgtggttaccaagcctgtaggtgccgcctgggcccagcaggagcagttcctctccgacgccagccatgagctgaagacccctctgacggtcatcctttcctccgccgagctgctggagcagagcgcttcgccggagcaggcggtctacgtggacaatatccgggcggagggccgccgcatgaaggccctggtggaggatatgctcaccctcttccgcgcccagaagaacgccggcagcccgccggacaccgtcaccgacctgtcggaggcggcggtgactgccgccctgcggtttgagccggtggcctttgaggccggccatgtgctggattacgatattgcgccgtctcttcctgtccggggcgacggcgccaagctgggccaggccctggcggtgctgctggataacgccgtcaaatacgccgcacccggtacgcccatccgcctgaccgccgtccggcagggcagccgcgctgtggtgtccgtgaccgatcaggggccggatatcccttcggacaagctcccccgcatttttgaccgcttttaccgcgccgacgacgcccgtaccgacggcgacagctttggcctgggcctgcccattgccaaagccatcgtggatgcccaccggggagtccttcgctgtgacagcagcggcggcgtgaccacctttagtatctccctgcccctgacggcagggaagcaggagagaggcacagaccatgtttgatacccttatccggggcggcgccgttgttgacggcacgggccgccccgcatttgcggccgatgtggccgtttccggcggcaggatcgccgccatcggcgatctgtccgcagcgtccgccgctcatgttatcgacgccgccggcaggaccgttacccccggctttattgacatccaccgccacgccgacgcggcgctgttccgcccgggcttcggcgcggcggagctgtgtcagggccttaccaccatcgtcaacggcaactgcggcctcagcgccgcccccttcggccccgcccatagcgacgccatccgggactacctgcgccccatcaccggcgttctcccgccggggctggtgacggaaaccctctccggctatttcgtctctgtgccgaatatccccgtccatgtgggtatgctggccggtgccggcgtccttcgggcggacgcggccggctacgagctggagcacctggaggaccgccactaccgcgccctgcaccgcgccctggagcaggctctggccgacggcgcgctgggcgtttctctgggcctgggttacgccccggagtgcttctataccacggcggagctgatccgtgcgctctcacccatcgcgggacaggatatccccctcaccgtccatatgcggcaggagggcgcgggcgtctgcgattccatcgaggagatgctgctggtggcccgggaactgcgggtccctctgcatatcagccacctgaaagccatgggccgggacaactggggcaaaaaaataccccgggccctggagctgctgcaccgggcgaaggaagaggggctggatgtgggctgcgacgtgtacccctacaccgccggctccacccagctgctgcatatcctgccgccggagtttctggagggcggcatggacgccgttgtccgccgcctggccgacccccacgaacgcgagacgctggctcaccgtattgaagacggcggcgggtttgacgacattgccaagctggctggctgggacggcatcttcctcagcagtcttcactgcccggaggacgcgccgctgctgggcaagagcatcgcccaggaggccgccatggagcacaaatccccgctggacgcctgctgcgacctgctgatccgcgagcactgccaggtgactatgatcgacttcatggccgcggaggaagacatcgccgctatcctccgcagtcccctcagctgcctgatctctgacgccacctaccccaccgaggggatgccccatccacgggtctacggcagctgtacccgtctgctgcagcacttcgtccgggaacagggtgtgctgacgctggagcagggcgttcacaagctgacccaggccccggcacaggccctgcgccttgcgggtaagggcgttatcgccgtgggtgcggacgcggacctgtgtgtgttcgaccccgccgcccttaccgagcgcggtacctatcaggacccctgccaaacggccctgggtatggacgccgtgctggtggccggccggctggccgtgaagaacggagaaatgaccggcgtgaaggctgggaccctcatccgcaaataaaaagatctcccccggtcgggggagatctttttatttcttttcgccgccggacacgttggccacgaacacgcacaccagaatgatgactacgccaagagcctgccacaggctgaaatcctccttcaggaagagcacgcccgccagcaccgataccaccgtggtcacgttggagaacagggaactctccgacactgtcaggtggctgttggcgaagttcagcagtccgtaggccacaccggaggacagtatgcccagatacagcaccgccagccagaagctgccgctttgcgccggcgcggtgatcagctcgctgtttatcccgccggcctgtatcagcgccaccggaataaacaccgccatgcccaccacaaacatcacataggtcatctcaaagggggtgaagcgcttggcggcatcgtggctcagcccatagtacaccgtgtcgctgagcatggtcagcagcaggaacagcaggcccagcgccgagatcatcaccgccccgcccacggagatcagcgctacgccgccgatcgcgcccagggcgcacagcacctgccgccgggtgacgcgctcatgcagaaccagcacgtccatcaggatgcagcacaccggcaccgccgcgatgatggtccccgccacagcggcggaggtgtacaggatgccgtagttttcgaagatgaagtacgctaccggctgcacgatacccagcagaagcagctttcccaccggctttcccttcagagagaaggcgaacagcggctttccgcgtaccttgcccaccagagcattcagcgcgatgaccagcgacatggccgccaccgccaccgtgaaccggaaggccagcagcactgtgggcgccgccgtgaccagcgccatttttgagaacataaagctcatgccgaagatggtggccgcggtcagcgccgccagcagcgacagaatatgcagttttttctggtccataggcaatacctctttctctttaacgccggtatcataccatacgccgcatgaaatagcaaggaaaagcgatcacctcccgcgctgcgtccggagcaaaaagggcgccgcccgaagggggcggcgtcctttcaccggcacgttgggagggcgcgccggcattcaccaatttgaaggggaatagggagaaaaattaaggatagaaaacaaagggtgttgggttacttgtccattgccttggacacgatacccgtaaccaccaggaccgccaccaggccagccagaatgaggttcagcaccatgctcagcgcctcctttcgtttgggcttcttaacgtgtctttagcatagcacaggacaagcaatttgtaaaacgcatgattatcatcaaaaccatgaaaaatactttgcagtacatggcgagatatgctatactggccctgaacaggaggtgtccccatgtccgtcaccaaataccagatatacctcaagaccgtggagctgggcagctttaccgccgccgcccgcgccctgaatttcacccagtccggcgtcagccacgccatcggctcgctggaggaggagctgggcgttacgctgctggtccgcagccacggcggtgtcacccccacggcggatggccgcgccctggcaccatattttcaggagatgtgcgccctgtcccaccgtctggagcagcacgccgaggacctgcgggggctggataccggtcttatccgcgtggcaaccttcaccagtgtgtcggaaaagtggctgcccggtatgctcaagacatttcaggaaaagtacccccgcatcgagttcgagctcctgccctccaacttcaacaacgagatctccgactgggtcctccacggtcaggcggactgcggctttatctccctgcccaccccggcggagaagtatctggattactggttgctccagcgggaccagtggaaggtcatcctgccctgcgaccacccgctggcgggccgccagcccttcccaccggaggccctggagcagtaccctcttatcctgctggatgagggcgacgactatgagatccaggccattttcgatcactacaaggtccggccccggatccaatacaccgttcagcaggaccagacgatcctggccatggtctccggcggcctgggcatcagcgtcatggaggagctgatgctctacaagtgcgcctatccgctggctgccagcaccctgcccaaggtgttccaccgggacatcggcatctgtgtcaaggacaagaacgccctctcccactccacgcaggcgttcatcgaccacacccgccattgggtgctgcaaaactttcccgagggctggaacgcccccaagccccacgagcgataaacgaaaaagcaaaaccaaacgccgtcctccgccgtcagtattggcagaggacggcgtttcgctgtccgccggaggacgatcccgtccttcctgaaggcgtaaagtgcgcgggacctgccccgcgcccgaaaggagtgcttacatgatgaaaaagatagttgcattgctgatggcgctggtcatggcgatgtctctgatggcctgcggccagaaggaggataacatcggcggcgagaaaaaggacgaccagacgcagaccgacggtcagtccgttgacctgcgggcggcgtacgaggccggtatcaagcatgtgcaggaggagctgggcgacaacgcgcctgtgctgctggaggagacggctgtggagatcctgaacagctactaccccggcctggagaacgccaagctgaagcagtccgtgttcttcatctcgcccaccgccacctcctgcgaggtgtccatggtggaggcggagagcgccgccgacgccgagatcgttcgccagagcttccaggcccgcgtggacgccatggccgacgagaccaactaccccgaggaggccggtatgtggaagaacaacgccaccgttaccgtcaacggcaactatgtggtgctggaggtgctgcccgacggctgcaccgtacccgacgcattcctggcaaaattctgatttcctatggcgtttcccctttctgtgtgctatgatggtctgaacgatacacacagaaaggagagtggccgatggaggacgctcagatcatagatcattttttccaccgcgacccggaggccctccgcgccgcgcaggagaaatacgaaaagcgctgccttgccgccgcccggcacatcctgccggacgttcgggacgcggaggagtgcgtcagtgacgtgtggctccgtttgtggaacgctatcccaccggagcgtccccggtcgctggcagcgtacatcaccaccgtcacccgccgcctggccctggacaagtgcgactataaccgcgccgcccagcgccgcagcgacctgactgtggccttcgaggagctggagggctgcctgcccgccgaggacggcgcagtccgcgccctggagcagcaggagttccgccgggtgctcaacggcttcctgcgtaagctgacccggcagagccggacgtatttcatccgccgttactggtatggcgagagcatccgcgagatcgccgacagctgcggcgcgggcgaggagaaggtcaaatcctccctcttccgcacccgtcagcgtctgcgtaccgtgctggaaaaggaggggatgctgtgaacgacaacagaatgaagcgctggatggacgccatcgacgacgatctgctggaggaggcccagcgtcccctgccccgcagcggtgcggcgcgccgctggggtgctctggccgcgtgcttctgcgccgcggccttggccctggccctgtggcagccctggtccgccggtatcggtgacaataccgccggcgcggacgccgacttcggcggcatggacaagagcttttccgtcgccatgccgcctgcgctggacgccgagccgctctctgcctctctggccctgccggagagcgcgtctctgacctctgactaccggtggcgtcaggacggcgagggcgccgtcaccggcgtgtcctgtaccgtcctgctggacgggtatgactatgactacggcgcggcctatgccagccagcccctgcccgccccggacggtaccctcccggcggacacctggcaggtgaacgacctgacgctgctggtctatgacgacggtgccgtgggctggtacgacacgtccgccggtatccagtggtactgcgcggcctgggacggcggagagccgctggtcaccgcctttaccctgatggacgcacagtattacaccgttcccaccgccccggaaggcgcggacgtgctgggctatgacctctttgacctgaacggtgagaccgtcaccgaagtctcctttaccctgaacagcgttacctggcactaccgcatggcccccactttggacgtttcagaaacaataccggacatctccgacttcaccggcggcagcctgacggcggagggcaggctccgctggtgccccaccgtcctccgatgggacgcgggcggcgccggctgcatcatctggcgggacatcgctcccggtctggcgtacagtctgaccgcggacaccggtgcgtcggagaagacgctggcggatatggccgccctggtgttcaagcctgcccagggggagtcctgaataagacgcaaaaagcaccccgaaaggggtgctttttgcgtcactcgtcgtatttccgacagtacagcaggttgcgggcggcgtcattttcgccccgcacaggggcaggaatgtctgcgttcttccatggcggttctgtcagaactcatcgatccagtctgacggcggtgccgctggcggtgaccatcagcatgccgttgtcagagccaagcacctcatagtccacatccacggccaccacagcgtccgcgttcagttggagggcgcgctgctccagttcataaagcgcctgctcccgcgcgttgatcagctcgctttcgtaggtgccggagcgcccgccgaagaagttgctgaagctggcggcgatgtccttgaccacgttaacgccggcaatgacctcgccaaatacgatccccttatactccgtgatgcggcgaccctctacggtgggggtggtggtaatgatcatagcgatccctcctctcagaactccggtgcgtccgatgtcttgcggtacagcaggggcttgccctcggcgtccaccagcagcgtcagcccgccggaattgcccacggcgtggtagagatactgcacaccggtctgggtatccaccagtacttcgctgctgctgataaagccgctgtcctccatgaccttgataaagcgctgctccttctttgccataggcttactccgcggcgggcgcgtcgttctccaccagcattttcgcgctggcggccagaccggccagaccctgtatctcgctggggatgatgagcttcgtggccttgccgtccgccaccttctgcagcgcctccagcgccttgagcttgatgacctggtcgttgggggcgttctcattcagcatacgcatggagtcggccatggcctgctgcaccttcaggatggactccgcctcggcctcggcggccatgatcttggcctgtttggcggcgtcggcccgcagcagggtggactgcttctcgccctcggcgatcagcaccttgctggccttctcgccctcggcctgcaggatggactcccggcgctcgcgctcggccttcatctgcttttccatggcgttctggatctcccggggcggcaggatgttcttcagctccacgcggttgaccttgatgccccaggggtcggtagcctcgtccagaatggagcgcatcttggcgttgatggtgtcgcggctggtcagggactggtccagctccagctcgccgatgatgttgcgcagcgtggtggccgtcaggttctcgatggcgctcatggggtattccacgccgtaggtgtacagcttggggtccgtgatctggaaatagatgacggtgtcgatctgcatggtcacgttgtccttggtgatgaccggctggggatcgaaatcggccacctgctccttcagactgaccttctttaccacccgctcgatgaagggcagcttgaagtgcagaccaacgccccacacgctgtggaacgcgcccaggcgctcgatgacgtaggccttggactgctggacgatctggatgcagctgacgatgacggccagaatgagaatgaccagaatgatgatggcgatggttcccgatgtcggcataatagttcctccttattctcctgtgtgtttcatagtctcagtatgcttatggatgaggtggatgatgcgggcgactacgcccagcagtatggcggccaatccgcccagaacatacggcatatcaaggctccttctgtacgatgagcttcacgccctccatccgcaggatacgcacggcggcgtccggctctatgacctccccgtcggcgctgcgcgccgtccaggtcttaccgtctatatagacggcgccggagggcagcgcgttgtcgatgcgctctgtcacgcggcccacattgttcagtacccggtcggcgttggtgggcttgatatcctttttcatcagcttggccaccagcggccgggtaaaggccagcgccgcgatggacaccgcgaagaacagtcccacctgcagccacaccggcccgccgcatactgcggcgatcagtccggccacgctgcccaggacgaaccagatggatgtcaacccggcggtggcggtctccgccacgccgaaaatgatgatagcagcgatccatatcgttgtcgccatgtctgtgtcgcctcctctcagaataagcccaatgatgccggccagcgcaccgatgcccaccagcacacctgcggccagccatttgttcttcggggacaggttggtcaggaaggcgcccacggcgctgcccagcgtggcgcggggcaggggggcggcctcctgctccggcgcggggcgtgcctccaccgccgcggcgggtaccggggcctcctcggcgaacaggtcggcgatagacacctgatagcggttgcagatataaaggatcttctccatctccgggtagccccgtccgctttcccatttgctcaccgcctggcgggagacctgcaactgctcggcgaattgctcctgtgtcagtccgttgccgcgccgtaccgctgccagccgatcaccaaatgccatatgtgtcctcctttgctttcggtgccgtcagtatacgggacaccgacggaaaagtctatcacgttcaggttgcatttccgtaaaattgtctgccaatgtaccgtgcatggtgcaacctcaggtttacattccctattatagcgtaagcggtcccgaaaagccactggaaatttaggttgcgcgccctggtatttttcggtatactctttggtagtcaagaaaccgaggtgtatcccatgataacttacgagatcccctgcctgctggggttggaaaagctggtggccgacgagatcaagcgccttggcctggccgacgtgcgtgcggaaaacggccgtgtgctctgtcagggcagctgggcggactgcgcccggctgaatatcaatctgcgctgcggcgcccgggtcatcgccctgctggggcagttcccggcgcggagcttcgaggagctgttccagggcgtgcgcgccatcccctgggaggagtttctgccccgggaggcggccttcccggtaaagggctactccatctcctcccagctgcactccgtgcccgcctgccagagcatcatcaaaaaggccgtggtggagcgcctgaaggcccactacggcatggatcagtttccggagacggggacgaaataccagatacgcttttccgtgttcaaggatcaggtgtccatcggcctggatgccagcggcgaagggctgtacaagcggggctaccgcgccgtaggcgtggaggcgcccctgcgggagacgctggcggcggcactggtgaccctcagccgctaccggggccgcgaccccttctgcgatcccttctgcggcagcggtactatccccatcgaggcggcgctcatcgccaaaaaccgcgcccccggtctggaccggcgctttgacgcccagaagtgggcattcctgccgcctgcgtgctggatggacgcggcagatgaggcccaggacagggaatttcatgggcagtacgatatctggggcggcgacatcgacccccgcgccgtggacattgcccgggacaacgcccgcaaggccggcgtggacgactgcgtccgctttgaggtggccgacgcggcccaattccaccgggacagcacctatggccagctggtgaccaacccgccctacggcgagcgcctgctggagagacaggaggccgaggcgctgtaccgcgccttcggcaaggcgtggcgcacgctgcccgcaggctggcgcacactggtgctttcgagccacacggagttcgagcgctgcttcggcaagccggcggacaaaaagcgcaagctctataacggcatgatcaagtgtgatgtgtttatgtacggcaatgtctgatggccatcttttccgctgatgctttgttgcggcggcttgccgtacacaaagtacgcctacgctgccgcgccgcgcctcagcgaaaaatctgagccgttaggggggacatcttttccgccctgccttaataaatccccggcatatgactttattttcaatttgttcactttcttttgcagaaacatgatacaattacccgtatgctttcgaaataaattcaacgaaattctaatatgttgatgaggaggagagcctcgatgaagcatatttttatcatcaatcccacggcgggcaagaccgacagccggcagaagatctacgacatggcggagtcgctgcggcagaagcacgggctggacgtgcagtgcatcctgacgaaaaagcagggccacgccacggagctggcgaagaagctctgcgagacgggcgaggcactgcggttctacgcctgcggcggcgacgggaccgtcaacgaggtggccaacggcattatcggctatgacaacgccgccatgaccgtgatccccgtgggcaccggcaacgatttcctaaagaacttcggcgatgatatggagaagttccgggacgccgaaaacctatgggacggcccgcagtttcctatggacgccatcgacgtcaacggccgcgtggcgctgaccatcgcctgctccggcatcgacgcgcgggtggcccgggacgtacataaatacagcgagagcccgctgctggacggcaagggcagctatatctactctctggcggtgaatttcctgttcaagggcatcggcacccactggaccatcaccctggacgatgtgaccacggagggcgactggtcgctggtatctgtgtgcaacggccggtactacggcggcggctttatgcctgtggccgaggcccggatggatgacggcgtgctgaataccctggtggtcagagaggtcaaccgccgcacgttcctgaaattcgtggggccgtactccaggggcgagtacgccaagtttccggaatacgcgcactgctcctgtcccaaggtggtacatatccactcggagaagccggacatcgtcacctgcctggacggcgagagcgtggtcaacagcgatgtgaccattaagctgcacgacaaaaagctgaacttcttcggcccggagggctgctcctgcaaccggacggcccgcggctgaggacagcgcttgaacattttgtgaatttttcaaaatttctccgtttcccccttgcaaatcccgcatagtgtggtatgataatcagcgttagcactcaagcattttgagtgctaacgctgaaactgttttatcaaaaatagaaatacaaggaggaaccaactatgaagctgacaccgcttgctgaccgcgtggtgctgaagatgaccgagccggaggagaccaccaagggcggcattatcctgaccggctccgccaaggagaagccctctgtggctgaggtcatttccgtgggccccggcggcaccgttgacgggaagaccgtggtcatgtccgtgaaggccggcgacaaggtcatcaccgacaagtatgccggcaccaaggtgacgctggaggacgtggagtatatcatcgtcaagcagagcgacatcctggctatcgtggagtgatgtgctttgccgcgtacacgccgcggcaaatgctttaagtttgcgtgttcccctgtaaatcattctcaattttggaggcattagatatggcaaagatcatcaagcgcggcgacgaagcccgcaaggcgctggaagccggtgtcaatcagctggccgataccgtaaaggtcaccctgggccccaagggccgcaacgtggtgctggataagaagttcggcacaccccttatcaccaacgacggtgtttccatcgccaaggagatcgagctggacgatccgttcgagaacatgggcgcgcagctggtgcgcgaggtgtccaccaagaccaatgacgtggccggcgacggcacgacgaccgctacattgctggcacaggccatgatccgcgagggcctgcgtaacctggccgccggcgccaaccccatcgtgatgaagaagggcatggccaaggccgtggaggccgctgtgggcgccatcaaggagcagagccagaaggtcaacggcaccgatgacatcgcccgcgtgggcaccgtgtcctccggcgacgagaccatcggcaagctgatcgccgaggctatggagaaggtcagcgccgacggcgtgatcaccatcgaggagtccaagaccgccgagacgtacagcgaggtcgtggagggcatgatgttcgaccgcggctacatcaccccctatatggccaccgatatggagaagatggaggccgtcgtggacgatccctacatcctcatcaccgataagaagatctctgtgatctccgacatcctgcccctgctggagcagatgctgcagagcggcaagaagctggttatcatcgccgaggacgtggagggtgaggccctgtccaccctgctggtgaaccgcctgaagggcgtgctgaacgtggtgtgcgtcaaggcccccggctttggcgaccgccgcaaggagatgctgcaggatatcgctatcctgaccggcggccaggtcatcagcgaggagctgggcctgacgctgaaggatgccaccattgatatgctgggccgtgcccgccagatcaaggtgaccaaggagaacaccatcatcgtggacggtatgggcgaccagcaggctatcaaggaccgtgtggcccagattcgcgcgcagatcggtgtgaccaccagcgagtacgacaaggagaagctgcaggagcgcctggccaagctggccggcggcgtggcggtcatcaaggtcggtgcggctaccgagaccgagatgaaggagaagaagctgcgtatcgaggacgccttgaacgccaccaaggccgctgtggaggaaggtatcgtggccggcggcggcaccatctatgtgaacgtgatccccgccgtcaccgcgctgctgaacagcaccgagggcgacgagcgtgtgggcgtgtccctggtagccaaggccctggaggcccccatccgccagatcgcggccaatgccggcatcgacggctccgtggtgctggagaaggtgcgctccgccggcaagaacggctacggcttcgacgcttataaggaggagtactgcgatatgatcgccagcggcatcgtggatcccgccaaggtcacccgcagcgccctggagaatgccgccagtgtgtccggcatggtgctgaccaccgaatccctggtggccgacaagccccagccccccgcaccggcagcccccgcacccgacatgggcggcatggggatgtattaataaattgacgcacgggggacacggcgccagccgcgtccctcgtattttctcccggttttgcaaaaaagctgttgacaaagggagctgaaatatggtatagtaactcgtgcctgtcgaggatgacatggcggcgtagctcagttggctagagcatgcggttcatacccgcagtgtcaccggttcaaatccagtcgccgctaccacaccggagagatgcgtcagcatctctccggtatacccctcgaaagacggcccgttggtcaagaggttaagacacggccctttcacggctgtaacatgggttcgattcccgtacgggtcaccatgtcggcaccccgagggtcgccgacaattcggaggcttagctcagctggttagagcgcctgcttcacacgcaggaggtcactggttcgagtccagcagtctccaccaaaaagttcctgatttcgtaaaaaatcaggaacttttttctgtttatactcccaaatagtgacgcagcattttggcgtttttcgcttgacccaaaccgtgacccaaaagccgagaggtcaagaaagcaccggagaggggcggatgatgccatccgcccctctccggtgctgttttttgtggtctacatggtctggctgatgacgctgccgatggtgtcggcggcgtcacgcttcatcccctccgtggcgtgggtgtaggtgctgagggtaaagcccgcgtcatagtgtcccagtgcgccggacagcgtcttgacgtccacaccgtacttgagggacagcgtggcgaaggtgtgccttaggtcgtgaaacctgatgtgctccgcgccgatggccttcaggctcttctcatgggtgtgccggaaggaatccgggtcgaacatggtgccggtcttgggcgatacgaataggtatcgaactggacagttccttgagaatctactggaagatacaccacatgatttcctatcgttgaacgtgtacaggtttgatgtcgccgatttgcatttttccgaaatatagaaacagaataggggagaatcggaaacctactcatcattgaaataatgagagcatattgcgtttcagggcacttccggatcctctgctttgttttgacaaagcaaaaagccaggcctccgggtacccagaggcctggctttttatgggagagcggaaggatcaatcgcgatccagctctttcagggcggtatatgccacgtcgcagcacttggcaatatcgccggcgggggtaaactcttccgggcagtggctgcggccattcttgctgggagcaaaaagcatgcctacatccgttacctgggaaatgaacatggaatcatgtccggcgccgctgggcaacgtcttcagcggtagtttgttttcgcgcagcccttgagacaatgcggcggtgactttttcggacaggtggacgggggccacttccatcaagccgacggtctcggtctgatagccttctgcttgcagctgtgccaacagcttttccactgcgccaaaaatggtatcgatggacgcctggtggggtgagcggcactccaccgacatttctaccttaccgggaaccacgttgggcgcgcccggctccacgtggagggagccgcaggtggtcacggtgccatcattcagctcccgggccacttcatccacgagatgcacgatcttcatagccgccacaacagcgtcaagacgcaggcgcatgggggtcgttccaccgtgatcgggccggcctgtgatgatgagcttcttggtgcggatacccacgatggtatccacgatgccgacggacagtttttcgctttccagcaccgggccctgctcaatatggggttcgatgaaataagcccaactggtcttatcgcgttttacctgaggcaagtcatccggggtcaagccgtaggccttcatgacatcgtaggcggtgacgccgtcgttgtttgtcaactgcttcagatagtccgtctccagcaggccggacagagccttgccgcccaggataccggagctgaaggagttgccttcttcctccacaatagcgatcacctcaaagggatgccgcagagagaggttgtcctcctgcatcatccgggccagctccagaccgcagataatgcccatggcaccgtcgtatttaccgccattgcggacggaatccagatgggaaccaacggcgatggccgccagggaacgatctgtgccctccttccggccgatcagattacccatggaatccaggcggacggacaggcctgctgcctcgagctcttgcttcaggtacgcctgggcagctcggtactctgtggtgtaggacagacgggtaatgcctgcgccgggcgttgcgttgaactgcgccaacgcttcgaccgtctgctcaatacgggatcgatttgcaaaagccatagtatcacttccttacttgatgggctgcaccatcttgccgtggcccggctgtgccacaacttcgccgttttcggccacgacggtgccgcgcaccatggtcagcacgggagcacccttgacggcaaagccgttgaaggggctgtgcttcaccacagagtggaacttagccgcgtcgacggtgtactccttgttcagatccaccagtaccacatcggcgtcggcgcccacctgcagcgtgcccttcttggggaagatacggaacagcttggcgggattttcacacatgacctccaccagcttctgcatggtgatccggcccttgttgacgccctcggtcagcataacgggcagagaggtctccaaaccaagcgcaccgttgccggcctgccagatgtcagcccagtctttctttttcgctttttgcttttgatacacttgtggcacagggagcgaccctatttcgcgttcctaacgtacgttcagttggtcatgttatagcacacagtttgcgaaatgtcaacagatttatccgacgaatatctgctttatttgttgccttttttgctgataatcgcgggttctttttatttccgtttgacaggatgaaaaagagcgctattcttttatacgaatgaacgttcatacgtcgctgtgctattccggcacctctatcgcggccatcgctaaggagatcggcatacagaagtcttcgctatacgcccatttcgcagataaggagcagctttttctggaagtctttcaacggtttcacgacgagaccgcactgaagctctctgccatttttctgacagaactgccggataaggagaagctacacgaggcctttctgctgttctgcgtcggcaggaacgccagcatcttccggatcggcctgtgattggcctttgcagcacgagcagatgcgaataggcgttgccatggcgaaatcccaccaaaatgcgaagtaaggcccccgggaattacccgggggccttcacggttatcgtatatatttggaggatgaaaaatcggatttattcatcctatgtcgtaggcactgcatcgaaagaattcaatcgtaaggcggaacaccgcataagccagcaagtctactttcaggatatccgtttggggccgttcacatcacggacagcatattgtagcgcttcagcagctgaatgtcctcccgggagatgcgcaggtcctgcagaaactccggtgtctccggctggatgctcttggacagaaataccttggtggaggtaggcataatgggtcggcaggagatgccgaagcccagcccccactttgttccggcgttcagataggaggcgggcagacagaggagatagacgtccatctccgtgtcctgattgtgggtaacgatgttgctgagggcatcgtagtggctcagcgtacccagataggtgttttcacagttccggtactgctgatagtcctgaaagttcatgtacagcgctatgtcataggcgttggcgccggtcttggcccggatatcgatgacactgcggaccagactgttgttccggccgtcgaaatagtacatatacagccggtcaacgccgcggaagaaggcgggcacgctgtcggccgtcagatcttccacgggcagcggggcacagtacagcagcttttccggcggcacacccagggcggccgccacctcgtacagcgtcaccacgtccatggcgatctgcccgctttcgtacttggatacggtggccccggttttgtggagcagcgccgccagctccacgatcttcattccgcgctttttgcggtagtatttgatcttcgcgccgatctcttctgtcaatgtcatggcactttcctcaaaatcaagttttagtgatttgaccctctgcttttcagtatagacgcttttcccggtccgcgcaagggaaaatataattgtgaggaaagtttttcacaaaattcgttcctgaaaagtaagcggcgggctttgacggggcgcgcggcggctggtattataaaaccataacaggaaaggagcgatacaccatgacctacaacttcgacgagatcattgatcggcgcaacaccaattccgagaatgtagagggctggcggccctacattttccactgcgggccggagagggtgttcccctacaaggacgaggaattcatccggatgtgggtggcggacatggagttcgctgtggcgccggagatcctgcaggccatcaccgaccgggtagatcggcgcattttgggctataccctggtgtacgataagggttattatgaggcgctgcgcgcctggtgcgagagccgttacggctggtccttccccaaggagcagctgacgttctctcccggcgtcatcccggcgctgtaccagctgacggaggacctggtcaagccgctgaatggcaaggtcctgaccatgacgcctgcctacggctttttcctccacgcctgcgaatacaacggcgtggagctggtgacctcgcccctgcgggaggagggcggccgcttctccgtggactgggaggaccttgaggcgaaggccgccgacccggatgtgaagctgctgatgctctgcaatccccacaaccccaccggccgcatctggaccgaggatgagctgcgccacatggcggccatcatcgaaaagcaccggctgtgggtggtgtccgacgagatccactgcgacctgatccgcaccggcttgcaccatacccctatgggcaaggtcatgccggactatgaccggctcatcacctgtatgtccgccagcaagacctttaatctggcgggcctgatgcactccaatattatcatccgcgacgcggaggagcgtgcccgcttccaggatcgggacaagaacatcggcgcggtgaacccgctgtccatcgcggcccacaaggcggcctatgagtacggcggcccctggctggagcagctgaaggcctatgtggacggcaacctggccctggtggaccgtttcctgaaggagaacattcccggcgcgaagtttaccattcctgagtccacctacttcgcctgggtggacctgcgggaggtgctgccggaggtggaggacctgccggacttctttgccaacaaggccggcgtgctgctggagggcggcgacggcctgttcgtgggcaacgccagggggcatatccgcctgaatttggccatgccccgcgccacggtgcagaccggcctggagcgtatcgccgaggccatccgcaaggagaaggccggcgcataacgccgcggccgcacgaataggcgttgcacatctcctgcctatctgctacaatggcggcagtgtgctgtgcgggagggaaaacgcctatgaaaaaaacgctggattccaacgcgatcaagctcgtcgccatcgcggccatgaccgtcgaccatgtggcctggtggctgtttcccggctatccccgggcggtgctgccactggcgatgcatatcatcggtcggctgacctgtcccatcatgtgctactttgtggcggagggctatcaccacacccgggatatccggaaatacacggcgcggatgttcctgttcgcggtcatatcccacttcgcctatatgttcgcgtcggcggattttgccggctggcggtcgtttatcccgttttcctccggcagagtgctgaaccagaccagcgtcatgtggtcgctggcatgggggctggtgatgctgcgggtggtccatgaccggcggctccgcccggcggtgcaggtggcgctgatcctgctgatctgcctggtcagcttcccggcggactggagctgtatcgccgccctgtgcatcatggccttcggtaccaatcggggaaagctgaagacgcaggcgctgtggatgatgttctatgtggcgctttacgcggtggtgtacgccctggcgctggactgggtctacggcctggtgcagctggcggtggtgctggccgttcccgtgctggcgctgtataacgggcagcgtgggccgtcgccgcgggtgaacacggtgatgaagtggctgttttacctgtactacccggcgcacctggccttgatcggctggctgcaaatgcaatgagacgcagatacccggcacgccttcggcgcgccgggtatcttttgttgacgtggtcgatttacagcaaggggcgccagggcgtctctctgaccagtcgtatcatctcccgggcgaagatgcccagagcgctgtcccgacggtacagcacccgcagctcccagctgagctcggggacgtctatggcgtagaaaataagctttcgcagagtatccgacggtatccggccaatgaagtagctggggatgaaagaggcgcagttttccagagaggccaccagcgtgtggttgatgaccggatcgccgcagtggatcagcgtgttgggaataatgctgtaatgctggaaaaaccggtgggaggaggcgtagatcatctgatttttgttgtacatacagtactgaaacggcggcaggtcctccaccgccagcggctgcaccagcagagcgtctcctgcatgagcggctttctgcaggagggcgcggtgcaggccttccgcatccctgatgaggtagaggccatgcgccagagctaccagcgtcggcgcgatgcctttgtgggccggctcaacgccatcccgggcgtgcactgtcagatgcccgagggcgccttctacacctgggtgtccttcgatgtggacatgacctccgacgagatgtgcgactacattctggaccatgccaaggtggtgggcgtctccggcgcggcctacggcatgactcagggctgcttcctgcgcttctcctttgccagtgacgccgcggcactgtcagccgcggccgaccggatcgaggcggccatgcgggcatatcaacaacgataaccgacggagctttcttcctgtcttcctctccccacaaaacaccacaccccgcggcgcttgcgccgtggggtgtggtgttttgtgtccagcgccggcctttactgcttgtttcccggccggaacgcgccgctgggcggggtgggggcgctgccggggtcaaagctgccgccgggtatctggccggactgaccgcccatgctgcccatgccgcccatgccgcccatgccggtctgtacgctgccggtctgggctgcggcggcggctaccgctttctggtgacccggatggaggacgggcgcagcatggctatcttcctggagtgcagccagtcccgccgcgccgtgcggacggtgctggtgtggtccctggcggcggacgcgatctgcacgctgccggtgcttgggttggtggcgcggcgggtgtccaaccgctgcgagaacgccggaagcatcgataccggcaagctctttgaccggttttaccgggcggacccggcccgcaccgccggcggcttcggcatcgggctctccatcgcccggagcattgccgagggccatcgcggcgccatctccgcccgcacggagggcgataccatcacctttaccgccctgctgaaataaacgggacggggccgtcaggccccgtcccgtacttttctgcgttaattctgatagtgtacccgccacgccgtgtccagcggctggcaggcgagcgccgtgccgtccaggtcggcgcggtgcatatccacggcgcacagctgggcggcgtcgtaggtggtgtagtaatacaccccggtgtcggcattgcagcagctggtatacagcgtcagctcgcacgcgccgtcctccagcacgcagcagccccgctgctgtgccgccgcgcccagaatgtgcaggagctggctgacgctctcggcctcgccgtcgccggagcggctgttcagccgggtaaaggccgtccgcacgaaccgggagggggaggacaggtcgccgggcagacccatggcgcccatgccccgactgtatgtctccagcggcagggcgggggagaagcggttttccggcggctggggggacagctgggcgtagtcgttcagccggaacagctgcatggggaagggcggctcgttggtcagcacgcccgccgggtcctcatagatccgcaggccctccgccgtctgctctaccgcgaagcactgctcccggtccgccagcagccagtgcagccgggccgggggcagccccggcagaaaggcgtcgtcggtgatgcggctctccgccagcaggtcccgggcctccgccgccgtggcgcagcagcccagcagccaggggatcagctcgaactgggccacgttggcctttcccggcgcgcaggggccgtatacagcgctgcgtacgaagttcagccccgccatgcacaggcccttctcgttcaccgcgtcatagtacaggggatagccgtcctgtacagaggccatgccgatcatggcgtagtgccgcgtcaggtccggcaggtgccgcatgggcaggggaaagtgccggggtgtgatgaccacctgctcgccgaagccgcgctcatagtccagattgcgcccgaaatagaagtattttgtcttgtatgtggccgcagtacacatgggccgggacctccttttattcgttatccgccggctcggcggggtactgccgcttcaggaaagagagaaaataccgggcggcgctgttggccggcggcggtgtctttaccgccgcgcccagccggcgtgacagcggctccgccagcgggagcacccgcacctggccctcatagcccgccagagagaaggcggacagcaccgacacgcccagtcccgccgccaccatggacagtatggccgcgtcgtccgacgccgtgacctccagccgtggtgcctccggcggcagcagccgcgccacatactgctccgggcaggagagaaatgtctcctgcagcaggcgctccagggggatgacgtcctccgtccaggggaagtccggcggcaccaccgccaccagcggcgcgtccgtcagcggcgtccaatagaagcccttgccgcaagtctcctccaccagggccagctgcacccgttcctcctccagcgccgcggccagctcatagccgcccaccagtacgtcgatcttgatctccgggtgcagcttgcggaacttctgcagcagcgccggcagccgtgcccgggcgatgctggcgaagcagccgatccgcagcacgcggttgtgggtctcgccctgggccgccgcctcccgccgcagggtctcactggcgcgcagatagtcctgtatatagggcagcaggtgctcaccctcctccgagagccggacgccgtggctgctgcgggtgagcagggtacagcccagctcggcctccagcttgttcaccatgtgcgtcatggcggactgggtgtagcccagctgcgccgtcgcctttccaaagctgccgcactgcactgccgtcagcagcgcccgcagccgtttgtcatccataggggcctcgctttctgtacaaattggacaaaattgcaacgattatttttaactatatcacaagagctgtcgccgttcaatgccataaacgtaaactttccaccaacgatttggaaaatgcggtaaacgtttttatacgccatcaaaatttttcatgtgccgttcgataagcgtcatttccgtaatgatgaaaagcatgatacgctatatgcacaggatgcaacgcgctttaaagcgtgagcctgcaccggcgcgccgcagtcggcggcgtgggaacaagagaagagaaatggagaaatcagaatgatcggacagaggaaaaacaccgcggcagatatcgttgtcgtgggctttgcgctgttttccatgtttttcggcgcgggcaacgtgatcttcccgccctttttgggcatggaggccggcagccagtggctggcgggcttttccacctatttcattgcggatatcggtctggcgatgatgggtatgttcgccctgctccgcgtgggcagcagcgagaaggtactggaacgggcgggcaaagtccccgccgagatcctcatgtgcgccatcattctgtgtatcggccccatggtggccatcccccgcaccagcgccagcacctatgagatggccatcgcgcccaacctgtccggcgtatcgccggtggtgttctccgtggtgttcttcgcggtgatcctggctctgtgcatcaaggagtccgccgtggtggacattgtaggcaaggtgctcacgccgctgctgctggtgggcctgttcgccattattatcaagggtgtgatcacgccgctgggcgatatcgcgcccctggcgcagatcgacaacgtggccgtcaccggcatcaaggccggctaccagaccatggacgcgctggcggccctgcccttcggcatcatcgtgctgcaaagcgtcaccgccaagggctatcagcggggccagagccagcttcgcgtggtgggcggcgccgcgctgctggcgggcgtgctgctgctggcggtgtatatgggtctggcctatctgggcgccaccgtgtccgcacagtacacgtcctccatcggccgcgcggccctcatcatggccatcatagaggcgttgatgggcaagaccggcatggtgatcttcggagtggtggtgggcctggcctgcgtcaccacggccatcgccctgaccagctccgccgcggcgtatttcacggagctgtgtcgcgggaagatcagctacaaggtgttcgtgacggtcatctgcgtgttcagcgccgtggtgtccaacctgggcctggaccgtatcgtggccgtggccgcgccggtgctggatatagtatatccccccacgctggtgcttatttgcgtctccctcatcatacccaaggtccacgactttgtcagccggggcgccgcgctgggcgcactgctgaccagcgtgctgtgcaccctgcacacctgcggtgtgaagctgccgctggtggaggccctgccgctgtatgatcttggcctgagctggctgctgcccgccgccgtatttggccttgccgcccagctgctgacgctgctgcccggcgtccgctgtgcggagaagcccgcccgccgcgccagcgaaaagcattaaaccgcttcccccgggcggggccgttcttaccccacggtcccgcccttctctcctatatttattatataccggcggctgtctgaaacagtccgccggcgggatcagcttgacaagagcaggcgtttgccgtacaataaacacgctgctgacgtcgaaagtacgcttgagacggaagatgcgccataggttctgcgcccgcgaagcgggcgctgtggtcgtgtcgcggtggcggcgcggcttttttatttagccgcggatcttacgacgggaggttttgctatggaaacacgggtggcggtcattgcggtcatcgtagaaaatgaggacgcagtggcggagctgaacgcgctgctgcatcagtacggcgcatatatcattgggcggatgggcgtgccctaccgcgcccggggcgtgaacatcatctccgtggtgctggatgcgccgcaggacgcgatctccgccctcagcgggaagatcgggaggctggagggtgtcagtgccaagacgctgtactccaacgtgatcacaccgatagaagacagataggcatgctgcacgacagctttgtataagagaccgtatcacggaaaggagaaaacaacatgaaaaaaatgatatccctgctgctggcgctggcgctggcattgacgctgtgcgcctgcgtaacgccgaaaacgcctatgcccattgaggatggcgacaaatccgccgtccagccggtcactgtgcggttgggcgggctgaagggccctacctccatgggcatggtaaagctgtttgacgatgcggacaacggcctgggccagaacgcgtatacgtacaccatcgcggccagcgccaatgagctgacgccccagctggtgcagggcgagctggatgtgctggcggtgccggccaacgtggcggccattctgtataaccagacggagggcggcgtggtgctgctggccgccggcacgctgggtgtgctgtatatcgtggaaaagggcggcgagacggtgacggacattgcctctctgaacggaaagaccatctacgccaccggcaagggcgctaccccggagtacgcgttgacctatctgctctcgcagcacgggctgactctgggtgaggacgtacaggtggagtggaagagcgagcccacggagatcgtggccctgatggcagagcaggacaacgccgtggccatgctgccccagcccttcgtcaccgtggcgcagagccaggtggagggcctgcgtgtggcgctggatatgagcgccgaatgggatgcgctggacaacggcagccgcctgatcacttcggtactggtggcccgcaaggcatttgctgatgagcatcctgcggcgctggcggcctttttggaggactacgccgccagcacggactacgccaatgagcacccggccgaggccgctgtgctggtggagaaatatggcatcgtcaaggccgccgtggcagagaaggcgctgccccagtgcaacctggtatgtattaccggcgtggatatgaaggtcgccgtgggcggctatctgcaaacactgtatgacctgaagacggaggccgtgggcggcgccatgcccggtgacggcttctactggatgggcgcatgagcgcacccgcggacaaaaaaataaagacctggcagcgtgccggcgcggtggtgctggccctgtcggtctggcaggcggcctcctgggccgtgggctcggcactgctgctgccgggaccggtaacggtgctagggcggctttgtgccctggcggtgacgtcgaccttccggcgggcggtggcgttcagcttttgccgtatcgccggcggctttgccctggcactggtgctggcctttgtgctggcgctggcggcgggacgctggccggtggtggaggtgctgctgcggccctatgtgctggccatcaaggcggtgccggtggcgtcgttcatcatcctggcactgatctggatgcggacatcggcgctgccgctgttcatctcattcctgatggtcttccccattctgtacaccaacgtgctggcgggcctccgcagtgcggatagccagcttttggaaatggcccgggccttccgggtgccctggcggcggcagctgcacagcatcctgctgccggcggtggagccgttcctgctggcgggctgcgccgcggctctgggcatgagctggaaggcaggcgtagcggccgaggtcatcggtgtggtggccggctccctgggcgagagactgtacgacgcgaagatctacctccagaccgccgacctgctggcctggaccgcagtgatcgtggcgctgagcgccctgtttgagagactggtgctggccctgctgcggcggggcttccgtcggctggaaagggggtgcggcgcatgaacgcggcacatctgtacaagcgcttcggcgacaaggtcgtgctggaggacgtgagcctgaccctcccgggcggggcggtggtgtgtctgatggccccctccggccgcggcaagaccacactcctgcgctgtatcgccgggttggagatgccggacagcggcaccgtcaccggcgtgccggagcgattgggtttcgtgtttcaggaggaccgtctgtgcccgcagctggatgccgtggagaacgtgcgtctggtcacgggccgggccatgtcccggccggatatcgaggcgcacctgcgggagctgggattggcggactgcctggaccagcgggcggcggaactgtccggcggacagcggcggcgggtgtccattgcccgggcggtatgttatgtgccggagctgctgctgctggatgaaccctttaagggcctggacggcgcggcccgggaccggacggcgcagtatcttctgcggcaccggaacggcgcggcggtgctgtgcgtcacccacgaccgggcggacgccgcggccctgggcgcagagatcgtggaaatatgaaaagagacggcggatgccgtctctttttgctttatctgatctgtccgttgccgcggatgacgtatttatacgtggccagctcgtccagacccatggggccccgggcgtggagcttctgggtggagatgcccatctcgcagcccagcccgaactcgccgccgtcggtaaagcgggtggaggcattgacatacacggcggcgctgtccaccccgttgacaaaggcctcggcgtgggcggggtcttcggtgacgatggcctcgctgtggccggtggagtgggcggcgatgtgaacgatggcctcgtccacgctgtccacgagctttacggccaggatatagtccagaaattcggtgtcgaagtcctgcccgccggcgggcgttccggggatgattgccgcggcgcgctcgtccagccgcagctccacggggaccttgcctgcggcggctcggtcatccaccaagcgctttttcagccggggcaggaaagcctgcgccgcggcgctatgtaccagcagtacctcttcggcgttgcacacggagggacggctggccttggcgttttccacaatgttcagggccttgctcagatcggcgctctcgtccacatacacatggcagataccggtacccgtctcgatgcagggcacggtggcgccggccacgcaggcccggatcagtcccgcgccgccccgggggatcagcaggtccaccagacccttggcggtcatgatgtccgcggcagactggtgggtggtgtcgtccacgatgttcagaatgtccgggtcgccgccctcggcggcgatgccggccttcagcgcctgcacgatggcgcgggcggtacggtaggcctccctgccgctgcggagtacgcagacattgccggatttcagcgccagggccgccgcatctgaggtaacgttggggcggctctcatagataatggacaccagccccagagggacctgtaccttctggatgaccagaccgttggggcggcgcacctcggacagcacgcggccggtgtggtccggcagggcggcaatggcccgtacgccgtcggccatgcccgccagtcggtcatggtccagccgcagccggtccagcatcacatcggagatatgcccccgggcatcgctcatgtcggtttcattttccgccagaatagcgccctcatgggacagaagactgtcggccatggacagcagcagggcgtttttgcctgcctcgtccaggacggccagtccgccccgggcggcgcgggtctttttcagaatatcgatagtggtcatggttcacttctcctttgccagaaatcgggtgcccacaggctttccgcccacgatgtcgtacagcagggcgggcttgctgccattggcgatgaccatctggcagccgacctcggtgacgatctgcgcagccttcagcttggtggccatgccgcctgtgcccaggccgctgccgctgccgccgcccagagcgagaatgtgcgcgtcgatggacggcaccacggggataagcttcgcggtgggatccctgtggggatcgccgtcatacagaccgtcgatatcactgagcaatatcagcaggtcggcctgtaccgccgccgccacgatggcggaaagcgtgtcgttctcgccgatggtgttctccacgcccacctcgtcagtggccacggtgtcgttttcgttgatgacaggcagcgcgcccagctccaacaggcgaaaaatggtgttccgcatattacggctgcgctgctcgttctttacatcctcgccggtgagcagcacctgtgccactgtgtggttgtactcgttgaacagcttgtcgtaggtgtacatcagctcgcactgacccacagcggcggccgcctgcttcgtgggcatatccttaggtcgtcccggcaggttcagcttgcccacgcccatgccgatggcaccggaggaaacgagaatgatctcgtgcccggcgtttttcaggtcgctcaggaccttgcacaggccctccatccgctggatgttcagccgtccggtggcgtgggccagggtggaggtgccgacttttaccgtgatacgcatagaaatgcccccttcgggaaaggaatttggagccattatactacgaaacccgggggatgaaaagaaaaattttccttgacaggcaagagagagctgtgatatgctgactgtactaacacgcatagtacacttgatacggaaaggagcgtgtgcgatatgatcgtgctggactaccgggacagccgtcccctgtaccagcaggtgaaggacagcctgcggcgcatgatgctgacagggctgctggagccagacgaaaagctgccctccgtgcgctctctggctacgcagctggccatcaaccccaacaccatccagcgggcttacgcggagctggaggcggaggggtacatctactctgtggcgggcagagggagctttgtctccgccggggacggcgagcatctgcggcgcatcgctgaactgacggggcggctggtcccgctactggaggagctgaagagcctgggctatacccgggaacagctgctggtactttgggaaggaggagagggtaaatgatcgaggtaaaaaacgtcgtcaagacctttgacggcttccgggcgctggacgacctgaccatgacggtgccccacggcgcggtgtacggtctggtagggcccaacggcgcggggaaatccaccatcatccgccatttggcgggcatctaccggcaagacagcggcgacgtgctggtggacggtcagccggtatacgagaacaccgccgtgaagagtcgtatggccgttatcggcgacgactggtactacttcccgcagtcgggcatccgggagatggcgaaattcctcgccggtatctaccccgatttcagctgggagcggtacgagaagctgaagcaggtcttcccgctggatgagaaaatgatgctgcggcggatgagcaagggtatgcagaagcaggcggccttttggctgatggtgtgctgtatgccggagtacctcattctggacgagccggtggatggccttgacccggtgatgcggcggcaggtgtggtcgctgcttctgggcgacgtggcggagcgcggcacgacggtgctggtctccagccacaacctgcgggagctggaggatgtgtgcgaccacgtgggcatcctgaaccacggaaaggtgctgctggagcggagtctcagcgatctgcaggacaacacggtgaagctgcaggtggcctatcagggcgttaccgagccgccgctgccggcggagctgaacatcctgcaccgcagccacgtgggacgggtgtacacctatatcgtccggggcagcagtcaggagattatgcgccggatgcagatcaccgagccggtgctgctggaatccatcccgctgacgctggaggagatattcatttacgagctgggaggtgtggattatgccgcgaaagacatccttctgtaacgccgcgctgctgcgcagcgatataaagcgctactggccgctgctgtttttgtatgtggccgtgtgggtggtgatccttcccatgcagatactgtcggcgagccgggagtgcgacggcgtggcggagggcatcatgaccgtgctgcagctgcggcagcacaacgtcatcatccagtccatacccgcctccgtggtcatgtccctgctgttcggctgctttgcggccatggcggtgtggtcgtacctgatgtccggccgcaccgtgggactgatgcacgccctgccggtgacacggacacaggcatttttctcccacgtcctctctgcgctgggagcgctgacggcggggaacgtgctgatcttcctgctgaccgctctgtgcagcgccggcttctcctacgtggactgggcggcgctgggcacgtggctgctgctgacggagctgatggcgctgttcttcttcgcgctcggctccctgtgcgccatggtcacgggatggctgctggcggtgccggtgctctacggcgcgatgaacgtcatcgccctccttctgtacgcggtgataagcacgatgacgcagatgttttacttcggctacagcaacagcgacattccggagttcattacctggctgacaccggtgggtcggatctgggatgccgtggccaacggcggcgcccagcccatcgaagtgcagttccgcgagcccatcggcacccaaagctatcaacgcgtccagctgccggcctccgccttctccacctgtatcatctacgccgcggtgggcatcgcactgctggcgctggtgtggtggctgtataaaaagcgccccagcgagacggccggcgacgctatgtccttccggtggctgcgccccatcgcccggtggagtatcggtctgtgcggcggtctggggctgggtctgttcctgcgctataccgcctttatcgatggcggcttcgcctgcctgctgatctgtcagctggtcatgggcgtgatctgcttcttcgccgcccagatgctgctgcaaaagaagttccgcatcttcaacaagcgctggtggctggagacggcggccatggtgctggtgctggcggcggtgacggtgtgcgtgaagctggacattaccggctatcagcaccgcgtcccggacgcggaggacgtgacctccgtccgcttcagcgccagctatgcggatttcaccgccgatgatcccgcagcggtggagagcgtgatctccctccaccgcgccattctggagcagtacgatgagacaggcgaaaggctggagaaccaaacctatctggacacggagggcggcccgatcacccgctatgtgcgtgtggactaccagctgcggaacggcacgagtctgcgtcgtgagtggagggtatcgatcgtcaacggctccgatgtccaccggctgctgacccagctggtgaaccgcaccgacagccgggagagcctcatcggcatcgactcgctggcgcggtacggcggcgtgaacgccgtgatcagcggctacgtccgccggtacgacaccgacgaggtggccgagttgacccggcagcaggcgcaggacctggcctccctggccctggctgacgcagccaacagctccgggccgctggatccgcggagtgacgacttctattcctatgccaagggctatgacatggatatacagctccgcgtggtgatcgaccgtgagacctccaccaccgtgccgctgaacgtgcccgcctttgcgctgcggatgcagaagttcatcgacgggctggagttccaggtggacggcacctatgatagctccaccgtggccgtggacgagatattgtacaactgagctgatacgccagcccccggctctgccgggggctggcggtatacgtgaaagcagtcccccggcaaggccgggggactgctgctgtttactcgttggtgtagttgtcgaaatagccctgaatgtagacgatgggcgtgcccttgtcaccggagccgctggtcaggtcgcacagggagccgatcaggtcggtgaggttccggggcgtggtgccctcggacaccatgttgcccaccagagacttcttggcgtccttggccttgatcttctcggagatggcgttcttcagttcctcgccgctgaggtcggcgaactccttgtccgccagatacttcagcttcagctcgttgggcgtaccaaccagaccgctggtatagccgggagccaccacggggtcagccagctcccagatcttcccggcgggatccttaaacgcgccatcgccgtagaccatggcctccacccgcttgccggtggcgtcgctcatcgccttgccgatggcctccgccaccgccttggcgtcgcggggaaacagcttcacgcggtcgtcgtccgccttgttgctgcccagcaggccgtactgggcgttgtagccgctgccgtccacgggcgcggtcagcaggtcgtccagacccagcaccgccttggcaccggcggcggtcagcagacgcttgctgcgctggcggctgtggatgtcgcaggtgatcaccgtgtcggtgtagggcaggatagcggtgacgcggttggcgaacacgatctccgcctgggcaccggcctcctcgatgatggacttgtaataggccacatagtccacgccggtgaagggatgcaccacctcaccgaaagccgcgcggaactgctccagcgacagcacatcgtgccacgggtcgatgccggcctcgtccagctggtccaggctcaccagatggttgcccacctcgtcggagggatagctcagcagcagcacgaccttctccgcgcccatggcgatgccacgcagcagcagggagaagcggttgcggctgaggatggggaatgccacgcccacggtcttgccgccggtcttggcgcggacgtcctcggcgatctgctcacaggtggcgtagttgccctggcagcgggccaccacggactcggtcacggccaccacgtcgccgtcgcgggcagtgatgttgttttcagccagcgcattcagcacggtgctgacggtgatgtccaccacgctgtcgccctcgcggaagatgggggcgcgcacgccccggaccacggtacccaaagttctgctcatagcggaagccctcctgatataattaaggtgttgtgttgaaatcgtcaaaggcagcgcaaacgcgtaacagtaaatagtatatcacaaaataaacataagtaaaatacataaaattgatatctgcattttgattagctaatgatgcggctggcgcagaaattcctcttgcttttttgcgggaaatgtgtataataacagggtatgcaagtgaatacgggcttgtagctcagctgggagagcaagcctgatatattgcaaccttgtcccgcaaaaatctcgcggccaaaattttcgccatcggagttgccgaaaattttggcaaggtggtcaaaacccacctcgcaaattcgtcaacaagacaaacaacttcatatccgggcttgtagctcagctgggagagcgttcggttcgcatccctatggtcgcacatcgacctgcgagtttcagtccatgatttcggagaggtttttctctgaattcttctaaaatcggaaaacttgaaaatcagctttttgttgcaaaaacccgcaaaaagcggcaatatgggcctatagctcagctgggagagcgtacggttcgcatccgtaaggtcgtcggttcgatcccgattaggtccaccatttcgagaaaaatcaccgccattttggcggtgatttttcgtttgaccacaataataccacagacggcagaaaattctgaccgcttttgaaatccgcaggcggtgagtagcagcccctcaccacctgcggattttcgttttatgtgtttgccggtgcggcaagttctgctctgacctcatcgtagtatttctgcaccgtggtgcggtccatgcctgtttcccgtgcgatatagcttttattgctcacgccggggtgctggcgcaggtactccgccagctgctttttcttggggctgacgccgtctggatactccgcagccgtcccattccgcaggacagcgatctccgctttcatttgcaggatcagcttcgccagcttttcctcacattcctcccgcgtgcggccatatacattgcgggagtgcttcttgccgtctggccagacgggcgagtaccgtccctcccacagatcctccttgatctgcttgatgtagcccgtgccgggtctgcggcgcggcggtgtgtacggttcaaacctctgcgcccctgatgcagcttctgctttctgtcgggatatttctgcctttgcgatgccgcggtcgatgctggctgcggcattttcctgcatttcgttggtaatgtgggtgtagatattcagcgtggtcttggcggagacatggccaatgatggcggacagtgtcttcacatccatgccgtgttccagtgacatggtggcgaaggtatggcgcagatcgtgaaagcgcacctttttgcagtctgcccgttccaatatctgctggagccgcttgcggacatagctggggtcgatgggctggttcggcttgatgcgggacgggaacatcagcggggagaatacttctttccgatattcccgtagaagtcccaccatgactggcgacaggatgatcgtgcgaaacgctgcttttgttttcggctcgctgatgatattcttaccgccaactggtgtgacctgcttgctgatatggagttcccctgtctcaaagttcaggtcatcccatgtgagtgccagtatctcaccccggcgaagtcctgtggtcagctccagcaggaagagttcgtacatcccctccgctttggcttgtatcagaaatcgctgaatttcttctttggacagcaccttcatttctttcggctccggcggcgggagcttgacgccgaggatgggatttttcttgatcaagccatccttgaccgccctgtccagcgccatccgtattacatgatagcagcttcgcaccgaccgctccgccatctccggccccttggtgtcccgatgtgtcttcctgccgttggccttcatttcgttcagaaacttctggcagtccgcctgcgtcagcttattcagcgggatatgcccgagaccgggaatagcgtggacatagatccactcctcatagcccttctgcgtagtggggcggatggatggcttgcagtgattttcataccagtaattcatccaatccccaaaccgcatatccggttttaccttgaagggggcgacctcggtgtactcctcccgaagtcttttcagcttttccacgcattccgcctttgtttttgccaggacgcttttttgctttgcctttccgttttcatcgtagcccacgatgtgacggccttcccaccgtccgtcgcttctcaagcggacagtaccctgaccgtttttgcgtttccttgccatgtgatcactccttcaccacaaagtcattcataaactcactcacgatccctgacgctttgcggtgcatatcccctgtgacatgggtgtaggtgtccagcgtgaacgaggttttcgtgtggcccagaatgccggagagcgttttggcatccacgccgctggtcagcgcgtgagtggcgaaggtgtgccggagatcgtgaaaacgcatatccggaagtcctgcttccgccagcagctttttcatgcgggtgtaaccgctgttcggcatgatggggtcttccgggtggatcgggttcgggaatatccactgggagatggatgtcctttttcgcgcggacagcagctgcaccgtgctgggcggtagtttgatgatcctgcgtcccgcaccggttttcgtttcgcccacatagtaaccgccgccctccttgttgtggagtgttctgcggacggtcagcgttcctttttccgcatcaaagtctgtccacataaggccgcacagctcaccccgccgcaggccggtggtgatctccagatagaagaagtcgtgccagtgctcatctgccttaatagcttccatgaatcgttccagctgtttgtcattgaggatagtttttgcggtagtcactttcttcggcagtgtcacatcgtcggtggggttctttacgatcaggtggcggtcaacagccgcattcagcgcctgatgcaggacgccgtgtatcctgcggaccgtggtgggagacagcgccccgccgtccacgccgccctcccgctgcagctttcgatacaaggtctgaacatcggcagcagtcaccttgctgatttgtttgctgccaagggagggtttgatatttcgctctgcatacccacggtagcccttgtatgtggatggccggaccgacggttcggcacactccctcaaccagatgtccagccactcccccagtgtcatgcggctgtcctccgtaagttcggcaccgtcatactcgacaatgcaccgatgcatcttttccatcagagccttttgcgtcttcgcggatacatagtggaagatcgagtcgccgttttccttgtgtccgaccacaatacgcccttcccagcgaccatcgtcacgcttgcgtaccatgccgtcaccggatggccttcgtttcgccatttacagttatccctcccgtccgtttttctttgtataggcattgcattccctgcgctgcctgcagcctgttttacaaacacaccataccgataaccctttgcgaaagcgagaagaattatcgatgtcgacgcactttctacgaaagcaacaacagtcgcgcccatagctttcaccacatggtctgctgccagctctgcccccggctcagcttttgtcccaaggccagtttcttcagcgcctctcgatgccgctgcttgctctccgtccatgccggcggcgcaggcagcggcggcaaatcgtctgcctcctctatggaccgacccagccgaaccagctcgcttgccagttctcccatccagccctcctccggctccggcgtgttgggccggaagcccaccgcctgtcggtaggcaaacagcgtttccaaattctccttcagaaatgtttcatcgtggaggctgctgtcccggcaccgctgaccgtcaggacagacaaaggtgatatgtttccgtgtgtccgtccagataacttcatagccctcgtactccatgttttcgacgaagctctcccggtcatcggcatattccagtgcgtcgttgatggcttggatgagatccagcttccagctatcgccacgcagtcccgcctggtactcgccggggcgcatctgctttttccgagtgtgcttttttggcggctccagcacctgcagcccgtgcgccatgcagatctcatcattgacctgccgatgccgctggagatctgcggcgttctggtgcagctttttgccgtccttgcagctcacgctgttgaccaccagatggttatgaagatggtttgtgtccaagtgtgttgccacgactacctcaaaatctgggaactgcttctgcgcgaactccacgccgatggcgttgacctgctgtggcgtcagcccgtcctccgccgggaaggattgaacgaagtgatagaattgtctgccatccgtttttcggaattgctgtttggttgtcatcatttccaggtacgatgtccttgccacgcagttgtgtcccgtcaccatccattggtcgtccagcatggttttgcaggcctgcgtcacatatttcagcacgcccatcatcgtaccagccgtctgtttcttgttgcgtactgcggtgaagatggccattactgcacctcccggctgatgcgcagcagcttttggcagagatctgcataaccgtctatgagctcgtcgcttctgaggatctggatgcgtcccatgtttgccagtgtcgtgagctggttgaggttcctgccttgggctttcacttcggcgaggatctcatccagtccgtccacccggacgatctccttgcccagcgcgcaggtgatgatgtaatcggtgacagtcattccggcttgcttggcctgatgctggatcaggtctttgatgcccggtgtcattcttgcggtgatgatcgctgttttctttctctgcattgaactcctttctctcccttggggctgggggtgccggggccttgccccggcgagtgcgtccggcgtatagccggacgctatgcttgccccaccgaagggtgggaactttgcccctacggggcatttctgccctgaacgcccccacataactgccctcgctgttgttgctaccttcgaccgtaaaatctcacacggcggcttacagcggtgtacatggcggtactttacgcgctccgctcccctgctgccggagtgaacgtagcgcccagcttttcggctcttgcctgtgcccgctgccgttccatggcttgccccgccttctccatctggcgctcgtaacagagggcgagggcattcttaatcggcaggatggtgtacctgagacagccgttgcgcttgagaccggccctggtgatgatctccgtgcgctctgttcggatgagcccatgctcctccagcgcggcaacatactttgccacggtgttgaccgagatacccagcttccttgcgatggtgggatagctgacaaggcactggtaggttcgtcgatcctcaatgcggagcagataggcgtagatgttgatctccatgtggtgcagtcccagatcaaagactgcgttgggaacggggaaaaagtttttgatggtgtccttcttcacatagggcgtgttcagcatcccgacgcccctttcgtgtgtgcggcaatccatttccgcagttcctccttcggaacgacgatgcgcttgccgatccgcagagagggaaaatcatcctcctgaatgagttcgtaaatgctggagtccgagactcccatgagatccaccagctgcttcacattcagcagcaggggcagttcgtcatagctggtataaatgcttttcttcaaatcgtgtcctccttgtagctttgttggtagagcgtattcattttttagtgatggtgtaggtctgatctcacctcccatgatttttctctgctgtacgccgcgctcttgctccgttggtgcgctcccccttcgcgggatcgtggcgacacttcgcccagagcatccgggctgcggcggcagggattcacttttcaaggttccaaaaataatggttgacatatctgtcctaacggattagacttatttcataaaacgtgtttcctgcgtctacttctaatcgtactataccatgtcagcaccctgttgtcaagtcttagcgaaagcagtatatttcattagtctaatttaaggagtgcacattatgccagactatatttttaaaacctacattgacggcggcagggagtactacgagtacaccgatgcggcggatagagagcagatcataaaaaaagactttccgttcccggaaagtctgatggagctgctgtatatggatacgcaagagctggaagccatcaccaagaaaatggacaaagccttgctggctttttaccagtccggcgccaaggatgacctgcaggtcgtagcagcaggactgaacgagcttgcatcccgacacgtctattttgagctgctgcggctggactggacagagcggttgaaagcggcggagcgcgtcacgcccaaggagtaccttcggctgctgccgcataaaaaaatcagccacatttacagcaacatcgataccatgcagcggcagatcatcagtttaatcgcacatgcgctggacatggacggcgagaagaaatccgtatctgaaaagatggtagcctactacaacgccgagggcaatgacacgttgtacactttccagttccagccacagcctgtcaacttcgaggtcatcgacagacggatctttgccgaggtgctatatcccaaggacatctatgacctcatcgaccaccatatacgggagtgcgtgaagcgtgaggtgaggatgcgggtatgcaagaactgcctgcgctacttcgctgtgacgggcaaggccagcacggagtactgcgaccggatctgtgacagcaagggccgcacctgccgggagatcggggccatcaacacatggacgcagcgcaagcagggcgacgaggtgttcaaggaatatcgcagagagtacaaaaagcgtttcgcccgcatcaacgccggcaagctgaccaagagcgtattttacgcctggagtgaggaagccagaaagaaaaaagaggattgcgacaacggcacgatcacaccggaggatttctcccgctggctgaaggagtcgtgagaaagagatgccgctaaaacaatgtcctaatggcggcgaatgtgcaaagcggaaagaggaggatccttttcgtaaaacctcctggtttcgagaatttacgagatttctttgtcagcgcgggagcagccgcaggccatccggtgcgatagcctgcggctgtcggtaatctttgattatggcatcccacgccgtggggtgccccttccatatggaaggggacactgatgatctgcaccaattctaaaaatgtgtcctacctcgattgcctgtggggagaactttacggcagcatcaacaacggatttttgcggatattcgccaaatagcattaaaatagcatggcggcgtcctcccgtgggccgccatgcctttaactgctgggaatgacagaaagaaagcagcggccttgatttctcaaaaccgccaccagtgaatataaattaagcgtgaaaatgggtctgcccagcagcggtttttttcttttctgccgctgggcagatgttttttctttagatacatgataagaggaatttttgaagattccataaagatttgaaaaatggacggacataaaagacgtccattacactatcggaaaatcagcaaggaagtttcatagtaacctttgcgccgccggtttcttttgaattttctaaaataagctgaccattatgttgttccataatcgaatttgtaatatatagacccataccaaagtgtaactttgaattgcggctttgatcgcccatatagaaccgttcctgtgcgtggcataatgcctctttagaaaaccccgttccctcgtctgtgactgaaatttccacgaaaccgttgttactctgaacatccacataaagcgttccgccttgcggggagtagtccagcccattactgataacattcataatagcacgttctatcagcaccctatcaaatttcagcatttgagggagtgaagcagtattcatttgcagccgaatttcttttgtccggcatagtgattccatataaccgaacaagtgctgcatgaacgctggcaagtctatactttcaatatggagctgataaccaaccgccgcccgtgatatatcaatcagggtttgaatatatgactgcatctggccggagctttccacgacgtaaccagcgtataatcgttgctcatcatcaagatttgtttctgtgagtaaatcagcatttccttgaataaccgtcagaggcgttttcaaatcatgggcaagcgcggcgatttgctctttctgtgtctgttcggttttccattgccgttctaacgaaattttcagattatctttcatatctgaaaaagatgcaaggacatcttcaaactctttgattttggcgtgtcctacttcaaaatcaaggttttgctttgaaacctccgcagttgcttctaaaagcgggttcagttgtgtacgcaggttcttagcaaatctggcggtcagtatgataatgaccagcagcgaatttacagccatcaggataaacgcaagcgtgtcaggagatggaaaatattccggtagccatgacactgtaaattgagaaccaatatagtaccttaaaacgcaaaattcgttttcccggacaacaagtgcaaactgcctccccgtagcatattcaatatattctccctttgcgtacagcagggcaatttctttttcatcatcgtccatattgctgtaaagctcattaaagttcttgtccagaattaagtagccgcatccctgtggaatcacaacctttgtaatatccggggcaatcgtcagcgttggaatgatctcttttacctgcaattcacttagatttgctcttgtagctaatccagcatttacagcaagtccctccaaaccagaagggacaataattgccgctaccagcatgacaatgagggagatagcaaactggcgaaacaatattttcaatgtaggtttctttttcactcccatttatatcctatcccccatacggtgctgatcggacttattttgaaatgctccaatttcgcacgaatattttttatatgcgttgagatcgtagagttatcgcctattccatcaaacccgaaaacggcttcatagatttgttcttttgtaaaaacctgtccccggtttttcgcaaggtattcacagattgaatactcgcttttggtaaggggaaccggctgttctgaaacatacagtacctttgcggaaaggtcaaatcttatatcaggctcaaatgaaagtgtgctgtgatgctcccttttttctctgcgtaaatgtgccgcgacacgggcgcgaagctcctgaatacgaaaaggtttcgtaatataatcatccgcaccgatgcccaatccaaacaatatatcttcctctaatgtctttgcggtcagaaagagaatcgggcagtctaccatattcctgatctgtttgcaaaactcaaacccgtctgtgccaggcatcatcacatccaaaagaatgaggtcatagaaatgcagctttttgatgtctacatcatccgcattttgacagactgttatcaaatatccatctttccccaaactgttcttaatcaattccaagatagaaacttcatcgtcaactacaagtaagtgggtcaaaaaatcacctcccgccccattataccacattgtcgaagttactcatcattatttttaatgtcagctttccgatattcattgttgatatttacagctacggcattgcttatatccacatccacaatactgtaaacgtagccgaaactgaaatcttcccccgccacatttttgaagcgtttcgatacctgcccgatttcttcttgcagttctgacatttcaagacattcatccgttatggtatatgtcaggccgttatatgaaatttcatcatagtttgcggcgttcagctcataatacggcagagattcatttaacgccttatttttatcggcggtatcgcggagcgcaccgcaggccgataagtatataagacttacaagcacaattaccacggcaaacaggcactttttattcactgtttttacctccctcccaaccatgaaaccaaaccaaactggcaatcagcagacaaacagtgcagcatacagaaataatcataccgctgaaaaaatcggtttttacctgtgcatacagttgggggctatcccatgcaagcacagtgtaatccatagcacgaacgccccaggcccagggaatatatttccatgtagcgtcaccaagccctgttatcataagggcagctattaaactccctgcaattcccaatcccatagatgcaccttttccgaagctcattcccacaaacaaatgaatcaggtaaatgggaagcatggtaatcaacaatagaatccctgctttcaggtaaaggcttgccggagcatccctatatagtgcagcgaatgttcctaacgctaaaaatgttgcgccaaaagcacagatcatcagaaaaccaagtttaccaatatacgttgccatgcgagatgggattgttcccaacaaaagctgataatgcccggcctgattttcgatctgaacaaccaggcccacaataatgccgatcagaaacgggaacgcaacggccagcacttccagataggcactgattttggttgccagttcccatctggatatatgatagtaacccgcaaaaatcgccgcacatataatcggaatcatgctgtgcatatagagcaaaatgctatgtttacacttctgatattctgctttccagcagcgaaccacagataccatagttaccccacctcctttttctcaaaccatcttgcagttaaaaatgacagcgccgcaaaccaggccagcgaaatgaccaatacaagtataatcatccaaaatgccattgccgtactctgatctgcaaccggctcaccattaggcaaaatacctaacacggaaatcataagatgcggcacccagctatacgggcagatcatccacaaagaggttgtagccgtgaaaatccctaaaacgcttccaagtccggcattaagaataaccgtgacaaagataccaactttttttgataaccataagcacagcggaacttcccataggcttgcaatgacaatacaagctgttccggccgcagcctgccaaattccgattgtcaggggaatttcgttgataactaatattgcaaaaccgcccaacagatttagcgccaggaaaatgaaattccccacacaggagtaaataccggccactccaatttttgctttccagactttgttctgcgaaacaggcaatgaagcaacggcacgatattttagcttgccattatcccgctgttcaatcaaggcacaggtgagcgtaaggaatccaggataaagcaggatataccaccaattataagaattgagctggaaccaaagaggggcaaaaaagttcataagcgcagttacaaacggggccagaacgatcagcgtttttgtgaaagttctcttatgctttaggttctctgcctgaatatatgccatctccatttaatatccctccttaccatttctgcgaataacatccataaagagttgttccaaatcttcaccggcgcgaagctctccctcatatccaaggacgccgccagcaatgatacccacatgatctgcaatctgctggacttctgacagaatatggctggacaaaataactgtaatccctttgcagggaaaagagcgaattaactctcgaagttcctcaatccctaaagggtcaaggccgttagtcggttcatccagaatcaaaagctggggactgttcagcaatgcaatagcaataccaagccgctgcttcataccaagagaaaactgcccggcccgtttcttgccggtattcgtgagctggacaatttgcaatacctcgttaattcgtgcatcgtccaggccgagcaatgtagttctgactttgagattttcgtatgcagtcagattttcgtaaagcgggggcatctcaatcaaagcaccgatatgctccagatcattccgcttccacgggtggccgtcaaactcgatgcttcccgatgtggggcgcaaaatgccggtgagcatttttaagatcgtggatttgccagccccattcggccccagcagaccataaaccgagttgcgccggatgttcagtgacacattgtttaccgccatttgccccttgaaatttttgcagaggtcagtcgttttcaaaatcatatccatataatcaagtcctttctttgattttacggatagcataccgggcaattttgaagatttcataaagattcccgaaaacagaatatgaacaatacaccgtaaccgtagagcatatcgcaacaaagcaccaacctacgcatttaggccttaaaaagccctataggggtgtttttcgggcgttttctccggctcttgacttggagaaaacggagatttttcaatggaaaacgctccggcgatacattcctcgtccgaagcgttcccagcatcaaatatgcgttttttccggctcttaaccgtcaatcataaatcagctcatgcatgatgatttcctctgctcggctgcggatggagttcatggactgcacccataacatctgattttccgctttcatagcttcgtctacgccctcggcttctgccatctgctcaatgataagactgcatctttccgttgcctgctcgttcagatcggcaaggtaggtgtgcagttcacctgagaggacaagggtcgaatagagggcagggcaaaactgtctcaaatacgccctgtgaagattgccccacctgccaatgggacggtgttcctccggcagcttccagtccggcacatagtaatcgcctacgagaatgtagtcgatgccgttttcgtggattcttggcttcaattccttcatgctggtacttcctcctgtcttgatttctttttgtggtactcatctctgcgcttggcaagggtggcttcatatcgccggatggcttcgggatctccggcttccgcatcggctttcattttctgataatggggcttgttatcccctgcaatcggggaaacgctgtgcgcaataatttcgttattgaaggtatccggcagcaatgtccattcccattgctttcccatgcttttcagaacggtcatgtcagatacaacgagttgaagcggggcttttgcattcctctgaatgagctgatgaaaaagaaaacggcgtgactttcgtcacgccgccccttgcaaacacaaggttttcaccattttttgattttactgttttacgacaacccggtattttgtgagtgtctactttcagtttataggtgcagcttcttttgaagctgcacctgatctttttaaaatctttcgcttgtctgcccagaatcagaactccggagtgctgttcacagctctctggctctgcatgcgataagtcaccttggccatcttccggttctttacggagctgatgatggtggggattgcgccgatcagtgtgaaggcatacagcttgataagctcaccggtataaacgccgccgtccagaatttcttcgtcaatgaggtaggggatagcccgataggaatctgtcagactggcctcaaaatacttggcaacagtaatggcccaatccagccgatagcccacataggtcattgccagcatcagcacacaggcaatcacaattcccttggtggacagacgcccgcccagaagctcatatcccttcagcgtgcagacagccagcacaatgccagacaaagccgctacatagcccagctgtcccagcagcacaatgcagcccacgcccagcaggcatcccagtagagcgcccaccacaccggccagcacattctccggcttgccggcagattcctgctgaatctgttcctgattatggcccagctgctgatagcagctgtcacacagcagggacggaacccctgccatgatgcatgcatccgtgtccgccgtctgcccgcaattttggcagcagctctggtagccgccggtgcgcaggagggataccacctcgcccgtgacctgctccagctggtcaatttgcttaaagctgccgaatcggggcttcaggataaattccacccggctgcggcgaatggagtagtttacaatcagcttgttgctcttgacaaaagccttgatttccgccgcatccggctcctgtccgctgtgagtcagggaaaaaacaagagaaacaaaattctggttgctggtgctgcgcatcagcatcatatgcaggccgccctgcatcccaaagagaatgccgctctgcgcgtctgctgtcaggtgaagccgctgggccacctgatccagataattctgctgggatttactcatgttgaaaactctccttatctttctgtgtttcagccgccggacgcaggcggcagaccggtacacataagctggcctcgatgagtatagcatagaaaccatgtgtagtcaagtgcacggcacctccagcagttcccgaaagccatcgaaatgatagataggctattgtgtttgttccgcaccaatagtgcccacagatctcacttcgttttcacaagagatagggtccggcattttctgttctttttctcttttgctttaccgtgccgtgtggcatctgtggttgtgttttcccacactggctgatggagattttgggcacttggattttttgagttcgaggtaactcgtcgttacatttctcgatgctctacagcagtcttttcgttagcataggtagttgccccggtcttaattttaaaaaacacagctctatacacacggtataatcagcgaccgagttttatgtttttgtaataaatataaatggcagcacacttgcatcttccgtgtgttggcctttaatacgctcaccctccgatgactgcccatcttggctggcgagagcgtcaactggtacacctgcatcattgccgagtgtgtggtgcttatctttgctgtgattctgatgaaatacttcgaaagaaccgacctcgtgttcaaatatctgcagtattaaaagggaagaagttatccaattatagctttctcttttagattaattgttttaaacaagatggcggctaaccatactcgtcgtcttcagacgtttctctttgtctattgcatcccattccctgcactgcccctgccaaagaaagcggttgacgattttcctcacttggtctatcataggcgtatgtagattaccacctcgtttagatgatatcgacgcacatctcctgtgaccacaacacgtaccacatacgcttccgggacacatggttacaacgggaaaaagaggccacaagaccatttacattccagccgaaagcgctggaaatgtttgaaaatcaatacaaatcagagcttttaattcgttcgcatccgagaggtcgagggttcgaatcccttcaggtccaccacgaaaagctgtgaaatttcatatttcacagcttttttgcaactttttgagaaaatttgtgtggatgcgaaccgagcgtttccggcgaattttggtatatttgggggaattcgcccccgaatggttcgcatccgtgttatgggagaggggacattatgaacgaaaagcaaatgcatcgagatgctacgctcgaacaacttgcgaaaaccgttgcatcactccagtcatttgattacgatacctttgacgcagcacgagaatcagtcaacatagacggagccgagtatgtgttcgacaaactgtctctctgcgggtatgcgcacaatttgagcgcacgcgattaccgcacttttggcgaatatttgtgtcagtttttggaagaagatagattgtccgatgatatgaaagctcgagaagaatatgcggttctattcgacttgtcctcgcactataaggaactcaggagcacgaaaattcttaaaattgagcggccggatttcgtgctcggaaattccggtgaaattggcattgaagttacacgactgacaaccgaaagcgagtctgtcatgcggagaatctcaaaagaaaattttgggaaaggacgcactgcggcggatattcgggaaaatgcgaaaaaagtacatggcggaaaagctgaaaactactcatacttcgatttgggcgaagcggtggcggttggagagagcctcgtcgacctttcggagagatacaaaatgtactccgaaagaattgtgaataagtaccacaaatacaaagagttattctgcaagtataagaagtttattgttctctgcaatgcggtcggatcgttctgcttgacatccaaagagatatcggaggaaatacttgccctcgccaaagaaactgaacccaatttgggaggattcacgctgtgcatacttcggacagattcggatggtaagagcgaggtggattcattctgcctatagaatcgcataacacgacataaatatgggggcagagcgtcggcttgttggtttcgtagaaccatcgagccggcgcttttttcatttacaaagcaaggaggatcacaacatgaatgaccacaacgcaaaacagcagctccgctaccttgaggaagtctgtgcgtgcctgcaccgtgcaggctttgaaacccagcctctggagaactcgcagatacctgttcaatggaatggcacacctctctgccacatcaccggcaagggcagtgtgttctatcggcgggaggatgtgtccacgccccaggcggaggaagccctcatccgtgccgaagacatcgcggctcggacactggagtacatgaatgctatggagactgccccgcagctcaaagccagcgggctggagggcgattaccgaatccttaccgacttcaacggcacagtgctggcgggaacacatagcaaacacggcgtccaattcgttacatgggattgggactatgaccgcacgggcttatcccacggacactatttcatggagaactataacggagccaagcaaaattttgccatacgaagcggcctcatccacaaggagcagcttttcagcccagagcagatgacagagatctaccgctgctgcgccgactctgtagacggtgattttttcgacctcaccgccgaacaggaaaaggtgatccgaagcgtacagcagcagatcgaggattgtgtgccggatttggccgagcgcatccggcagcaggaagacgcgatggaacagacaatgtaataatgtaatacagaatgtcacgggacgaagtttgaagggtcagacttcgtcctttttgcattttatggacaaaagtcggaggaaaacatgatcgatgggatcagacgcagtgtagacaaacgcacctgcacggcatttgtgccgacgccgccggagccggtgttttgcactgagaacgaacgatgccgcggatgcccgtaccccgcccacggtgtcatctgctggcatcgggatgggacttgcctgcggacagatatggagaaaatcgagaggaggcagaagaatgatacttaaagcagattttcgctgcaagcaggtcgcgctagaggtggaggcttgcgtggtggagaaggtggtcgaactttccaccgcagagtttgaccagttctgccggtcgatgctggagaaatatccgttcatcagagaggccagggcttcgcttcactatgatgacgggatgaggtatggtttccttgtattgggagtaggccgaaatgatggcatccttgttgatacgcagggagcggattatgcccggtacagtgcctttgtccccaacgcccgcagcttgctgacgccggatatggggatcgaccgcagctatctttcgccggcagagccttggcgggatgagagcagggatgaaatgctccgcatgacgctgcgcgtcgatggaaagccggactacaccctcgtcctccccgctgatgaggaatacctcgacgcggtgaaggattacctcgatattgatgttttcgcggatgccatgctctgtgatattcgcttcaaggtgccttacatcggtgagctgatccgcgatacggattgccccgccgtggaggattacaacgattttgccgaagccttggaggacatctggcagcaggacgggatgctcctgacctacgctgccgtgctggaggccgagcggccggatacgctgcgcggagcctgtgagctcctgcgagatctggacaactaccagcgcatcacggaggatgcctatggttacgggcagcagcgattgcaggaaacgctggggctggatgatgaggccatctatgagctggacggctacatggattttgagaaatacggtcaggactgcatggaaaacgactgcgtgacaaaaacggagttcggcctgctgcggcgcttggacccgcccttcccggagcagacacaggggcagaggatgatgtaagcaaaagcggctcgatccatttggaacgagccgcttggtaggcagacaaacgggaatttgtttgtacaatgttcaagatataactgttattatgtcttgattagagtacaaactcatataagaggaacttcctcggtaccccaatatcaacatatgtgatttcaaccgtatccacatacttaaatccaaacgacatatacattttctgtggaatatcatttccctctatgcaatcaagacgaattgatttaaggtttctttcccttgctgtgtctattgcgtgttgaactaactgcttcgagtatccacgacctccatattccggaaggacacgcaaggcatgaagaactactgtctcgttatcatttgcatcaataagccatttaactgcgtgatacgcctcatcacgatcatgattcataatatacgccgcaacaattcgaccatcttcaataccgataaactgatttctctctttgattgcatctttgatcatttcatctggagggaaaccacctttatctccctccggcagaaaatctttttcgctcaaaactttacacataccgtcataaaactgtcgcaattctataaaatttttctcttctgcatatctgataatcatagaaatctatccctccaacttccgatttgtttgccacatcatagcacaccctcaaaaatgtgtaaagccaaattctacaccgaaaggagatcttaaccttgaaagatgcaacgcaatttcatatccgccctgcccgcccggaggaggcgggcttattttataccccgcaccccgaagaagataagcggctgggtaccgttggccacgtccgcatggacttcgggcgcagcggcaacgagttctggcatacatggtggccccgtggcccggaggagctgaacagccccgcattcaagctggagctgcaggaggtcgtggacacgctgcgggagagtgtgctgaaaagccgctttgctatggagcgtttctgttatgatcacggcggcaaaatcgacggcggctggacacaaaactacggttacatcgtggaaaccgagcattaccgctactgcctgcgctgcaatccgtcccccggagattataactgctactgtacggcctatgatctggatgtccagcggcagaacatggcgtgggaagaagtgcctcacatggaaatagagggcatgatatgagcatgggaacggcttgtgccagagggcctcccaccgtaataggtcattgtagatctttccgttgacttacggatggttgtgtggtagttgtttgtgctaccaaaaacacgaaaggagaaacgcacatgaaaaagaggatcatgacactgatgatgggggcactcctgctgctcacggcctgcgggcagacgagggacaactccacatcgacgatgctgccagtggcggcggtgcagagcgcagcacaaggtgtggctggtgtagcggacaagacggcggacaaggctgaaatgccgcagaaggaggaaaaaaccgaggacagtgcggatgcgctgctgcctgtcgaacgggtggatacgcctacagatgcagaagcggaaaagaatcttgcacccgctgcaccgaaagagccggcaacacccgcgcctgtgccggaggatacacctgcttccacacccacgccggcacctacacagaagccggcagagaaacaggaggaacaacctgcgcctgcgcctacgcccgaacctacgcccacgccgaagcctgccgccagcggggacatctactccatcgcggaggctattcaagcaggcaacgagtacgcaagagcgcagtacggcgtgaccatcgacaccagtatgaccgccgccgactccagctacttccccggcacggcggacagcgtggcatggctggcggagaacggtggacaggcggcactgaccgccgcggtgcggggtaatgtggacgccaccttcgcctgccttgccgctatggacggcgcggaaacggtcagtgcgtatgcgcggttcaactgcaccgtccgctacgatgcggcatcggacgaatacatcgtggtggtgctgtacggataaaccaactgaatacccgaccaaaaggccgacagcgtatgctgccggccttttgcgttgggagaaaggacgagcatgaagaaaacaattcctaagctgttgacgctggtgtgcctactggtggctgtcatgggattgtccgttgtgacagcccacgccgccacggtcacgggcatcgtcagcagcggcaacgagtaccgctaccacgaggacaagacgcctgtgtcccagtgggggccgtacaccagcaacaagctcaagtatttcacccggaacgacaccggggagactgtcccggcctactgtatggagccggaggtgcgctccgccagcggtgatttgcagtattcctccacatcgtggagcgatttgacgtggaatcagcggtatgccgtgacgctggctatggcctacggttatggcggcaattacggcttcaatatgcacccggactgcgcgcagctggcgacgcaggcggtggtgtgggagttcgtgtgcggctaccgcagcccggtgtatccctacgcgctgtatgataccacctgcgccaacctgttccattatgcgggcgacgacgtggcggtggcgtacaacatcattattgaccgcattatgaaccacggcaagatccccagcttcgcggtgaagtaccgtaaccagctttcggacgccaacgctattacgctgacatgggacggcagtcagtatgtgggtacagccaccgataccaatggtgtgctgtcgcagtattacttcagcaccaatatcagcggtgtgacggtcaatcagagctggaacacgctgaccgtgacggccacaaaggacgcagcggcgcagctgaacggctatatcagcagcgactacggctactcgctggatgtggcgggcacggagtccgtgctgctggaacccagcaacggcagcggctaccaggcgtgtgcggcgctgacctcgctgcctgatcccgtgtgggcgtatatacactttaaggtcaacattgtggaggagaagggcagcctgaccatcaacaaagtcgatgcggagaccggcaaggcgctggcgggcgtgacctaccggctgtacgacagcgcagggaaaaaggtggcagatgtgaccaccggcgcggacggcaaggcagtgcttgctgatttgctgcagggcaggtatagctatcaggagatcagcgctctctctggctatgtggtggacagcactaagtatcagatcaacattacggccacggcgttgaatattacggcgaaacggacgaacgcgctggcaaaaggcagcctgaccatcaataaggtagatgccgaaacaggcaaggcgctggcgggcgtgacctaccggctatacgacagcacgggggaaaaggtggcagacgctaccaccggcgcggacggtaaggcggtttttggtgatttgccgcagggcaagtacagctatcaggagatcagcgcacccagcggttatgtagtggacaacaccgagtatcagatcaccattacggccacagcactgaacattacgcacaagcggacaaatgcgttggcaaaaggcagcattaccgtccgcaagttggatgccacaggcgcacctcttgccggtgcggagctgctgctggagacctccgcagacggcgagacgtgggcggaggtcggcagagtgaccactgacaacataggcatcgccaagtgggagaatcttaaaatcggtgttcaattccgtattaccgaagtaaaagcacctgcggggtacaccctgatgaccgagccgctgttcacaggaacgttggacagcaataaccgagacattaccatcactgcctgcaacaacgcaggcttcgtcctgcccttcacaggcggtacgggatttacaacctatttcctgtttgcagcactcatgctttgcatgggtgtttatttttgcaaaaaattagcccgccgcaaaacggcaggctgatggttcaattctgaaaggcttgtagctgctgttcacagaactcgcatagagcctccgtgcgccaatcgctgggcatcaggcggcaacatacagattcaccctttctttcagcaccgtatcacggaagcgtacatcgttttccatttgaggccgctgctccagcgagcttaccgtaatcaggtcaatgcttttttggagcgcgtcttccaagtcgcagtacacagcggaaagcgagaggagactcttgatgtttgtccccgaggtgtcaatcaaaaggtctatgtcactggattcggtcgccgtgccgcgggcataggaaccgaacagataaaccgccttcagcccgtacttctgtgcaacaggcaaaatacgctgcgcgatttgctccacggtatagaccatctgcaatcacctccttcggattgataccaccagtatacccgtaaaaagtgaaaaactcaactcaaaaattatgaacaaggagaacaactgaacatgaaaaagatccatcgcctattggccatgctcatggccactatcatggctctgagcctcatcaccacagcatttgccgagccgaccattgacaccagcaagaaagcatccctttccatctacaagtacgacatcaccacggccagtgcggagggcgcatgggacactgggtcctatgtcagcaccggcctgcatgacgacgcggttatcgacaagctgagcaagtacgccattcagggcgtagagttcacatacctccgcgtggccgacatcaccatgaacaatgaagtgttggacggtcagcgcacggtgggtgtgctgtatggctttgatggctctgaacgcagcaacgccgtgctgtctgccatcggcctgaccggcgcagacgctcacaagactgaggatgacgtcaactacttcaccagcgatgtgctcaacaacaagctgtccaccgcgctgactgccaatgccaccaccgtgaaaaatgcgctggaggccgctgccaagaacggcggtgttgccatgaccgaaacggatgccaccggacacacctccgcttccaatatggagcaggggctttatctggtggtggagactcgcgtccctgaaaacgtgacctccacctgcaatcccttcttcgtgtccctgcccatgaccaccatggacggcacagcatggaactacgatgtcaccgtttaccccaagaaccagaccggcaatcctacgctggataagaccgtgcgtgaagcaaagaactccacctgcaagaataccggcagcctgaccgacatccaaaaaccaagctgtgatccacctaagaccagtaaccaccaagggagggacttccgtccctcccttggtggttgtccagcagtttgtcgcaatcggggcgggcttatgccggcaggttgatatgaccgattttatccagcgcagagagatcaacgctttccacatatgctttgatctcgtcatcgccgagagagtcacccggctgagagaccaggctgataaatgcgttctcgccgttgtaaaggacaatgaactgatggttgccggagtaaacagacactgtctcgccgcgcgcggtggtatacgaccactcgtgatattcatgggcgtcatccagagaaaggcagtcgatgctcatgcttcccttcacccggcggtttatggcaacggtgcagaagctttcttcctcgccgccggtgctccagtcatccccgtaggagaaggagccgtcgttccatacccgatagtcggggacgccctgccgggacgggctttccagcgtcaaaaagccatcgctgccgatgatctcgcaaaagctcgtatatccggagccttcgtatagagcgtcccacggcttgagatcgtatttctcgctgatctcaaggaacttgttgaccagcgtttccgtgtaaaggccgttgtagaccctcccaagggcttcgccccagtcccccagaggctggtgcagcgcatctccgttataaccgtttgcttcgtaggagctggagaaggcgttgaactcgcgggaggcctcgtattcgggggagccgatgcagccctgcatgctgatggtcattccgtcagccagctttttgcctgcatattcaccgttcacatagttgtcggaaacgatctggctgcccatcacagcgtctctgataccaaacagattcaccgcgtaggcccccacgcacatggcgcacaaaagcgctatgacagccgccgccaccagtaccgatcttctgacaggtctctttttgtgaatcgtatagttttccatgttcataatctccttttcggcatcagatgcctcaaccgtctgcatcaggtcgatggcatccagtataaatttcggatcaatattgttgaacccggacagaaagtcaaacgatgtcatagcaagccctccttagataaatatagccgtaatttctgcctggttcggaaaagtgaggtttttactttgctttgtgaacacttgaacctcaaggcaatgtccgctatggaagcaaagaaccagtagcggcacacaaagatatttcggtcgtctgctgagagtgtgcaaagaaattgattgaccgccgcggcaaactccttcctctcgcattccgcttccacggaatcaccggaagcgatggtgtccttcagctcgtccaatacaagatcaaactcaccgccgccgcgtttccgggcgtactgctcccgcaacttcatcaggctgagatttctgacaatggctgccgcaaaagcctgaaaacacgttggccgctgtgggggaatgctgttccatagggccatgtatgtatcagacacgcattcttccgcgtcctgcgcgttggataggatattgagagaaattttcatgcaaagcctgccgtacttttcatcggtacaggagatggcctcctgacttcgctgccagtatagatcaatgattctttcgtcctccatgacggcctcctttaagagctctcatccagtaagttgcaaaaagcggtggacaggttacagttttttcagcggtgaatgtggcagcgcaaaatgcccgaggataaacggtgtcatcgtcatattttagcgtctttccgtccgacaggcaaggagaggtaccgcaacgccgcagacaagggtacgatccaggtcattgccggacaccggggctggcgcggtgcggactacttccggtatatcgaccgcttgcaggcgggcgataccgtgaggctcaccaacttatgggagacgctgacctacaccgtagctgacattcagatcatccagccccatgaggtagataagatcaagatacagcaggggtgcgacctgctgacgcttctgacctgccacccctacgccagcggcgggaggcagcgctttgtggtgtactgcgagagaaaggaggtgagataactataagcattttcggcaaggtgaccttcgtgggagacgatgacagcctctatgacgatgcagacgccttcctggactgcatccgtagggaattgccatattttagtacctcaggtttccgctatgaagtcctgacagacgatcccgctatccgcaaggcagcagatgacatcctgtttgactttcttggtgaggaaaacccatgtgagctggaagactacacacagacgatgggaggaatttagtatgaacgtaaatcgggagatgctgacgttcctgcggaagcagtaccctgtgggtacacgcatccggctggactccatgcaggatccgtatgcaccggtggaggctggcacgacggggaaactggactatatcgacgacgccgggcagtttcatatgaaatgggacaacggacggacgctggtgctcatccccggcgtggacagctttaccgttttaccgcccgagctcagaatgacgaagctatatatgccgcttaccgccgagctttatgagccggatgtgtatggcaatatgcaggaagaaccggagctgctgaccggacacgacctgaccgcgtatgaggatcatatccgcagcgcactggtgaagtatcggatgccggaggagaccacccgaggcatcatgcactggtacgatacgccggacagtgtgaacgacaaggtgcgctccgttaccttcgacgtggagcggcgaaacggcaagctgtggggtatcgcggaatgtcagatcagcggcgagttgtcagcggcagagctgaccacgctgaaggaatatattgaaggacaggcgtcggacggctggggcgagggtttcgagcagcatgagatcgccgttggacgcggcagcgagctgtatgtgcacctgtggcaggatcacggttggagcatccagacggagcgggaacgcttctgcgcccactttgaaaagctgccggagatgtgcttcacgctgctgccgggcacaggacagcttatctgcatcaaacgcggcgaaagcgggtactaccccagcgattggtctaccggtgacgcccgcgagaaccgccgtatcgcggatgagcagaacagaaagaggggcgtgacgcctgcgcaggaggaggccatgaagatcggcagcatgtgcggctgggatgtacccggtgcagacccggacaactgtgaggacatcgtacagcgccgtggggggatggagcttggataaaaagattatctccatatacatgggcaatcccgacaacagcaatcacgcggagctggagctgcccgccacgccatgggaaatggtggatgccatggacagactgcgtctgtcagctggacaagaaccctattggcaggtggaggacatgggccgatatgaatttctcgccccacatcttgatgggtacgatttgtaccagtttaacgcactggcagagaagctccgtacattcggtgatgtggatgccgtggctttcgagggtctggtgcagatggagcttaacaatctgtatcagaacaacggcggtgatctgacgctccggcgggtactggatctggcatacagcgtggattgctgtcatgtggtgccggggatcacggacgatgcagcactgggacagttctacgtggagaacgattttcttccggctttggcaaccgtgccggacagcgtattggaaatgctggactacgagaagatcggcagatcgatgcgtgagggtgagggcggcgtacttacgccccgcggctatgtgatgcaggagtccgagctgcggcaggccccgtccaacttgggcagaccgccacgaaagccgccgtatatgatctatttcctctgtgtcagcgacatccgtgctgtaaagttgtacctacccgcaaagcaggcggagctggacgccgtactggactgcctggaggtggacagctggcaggaggtgcggctggaggagtgcgacgccgccatgccggagatgtggcacttcacggatatggcctatgacggcatggagcagatcaaccgatttgcacagtgcctggaggaactggacagaaataacgaactgataaagttcaaggctgtggccggtcagctggacatcagaagcctggacgatgcgcttgcactggcagagcatctgagcgaatatgcccttgagccggggctctattctctggagggattggcgagggaggagctctccgtcatcgtgggagacccggatggtgacctgctgatgcggtatctgaatatggacgcctacggcgcagcgctgttatggcgggataagggagttttcagtgactacggctatatctgccgtccggacggacagccgctgcaagtaccgcggcaaggcgtggacatgaccatgcagtaaaatttaacaacaatggggccgctttccgaaaagggatggcgatccctctttttgcgcccttttcggtgaacggtcaccggaagggagtgcaagaatgacgaaggaaaccgtcgccctgtatctggaaaatggatttaaggggcgcagaaatgtgatcagcagccgggaattggagcgtgtgctgggcatcagcgggaacgagctgcggcggcgcgtcaaccgtctgcggcaggacaccgtacccatcgcggcagaccagcggggctactacttcgcggaaacggcggcggaggtctatgataccatccgcggcttgcagaaaatgcgcagcggactggacgcggctatctccggactggagcgtgcgttggagaaatttgatgcgtgacagcctgataaagctcatgccttggatgggcggtaagggacagcttatgtgggccatacagatgctcttgcccatccattataaagcactggtggatgtgtttggcggcagcggtatcatcacgctgaataccgccgtgccgaaggggtgcctgcaaatatataacgacctgaaccacgacctgtataacctgcttttctgcgtcaagcaccgccctatggccctgacgaaagaactgagctttctccccatcaatgcccgtgatgaatttgatgtgctgcgcagacagctgcagggcgaggacttcacacagctgtatctggatgaggagctgcagctggcagagcagatgttcccaccgccggaggcggaggaggtcaagcggctgctgcaaagccgtgcggagctgtcggatgtgcgccgcgccgccgctatctacaagctgcagcgatacagctataacggcaacggcgacagttatggtgtgagctcctgcgatatacagcggttttttcgggatatttgggagtgttctcaccgcctgaaggatgtagcgctggagaataaggatttcgagagcatcatcaccacccataatgacccgcagaccacggtctactgtgacccgccctattatgaggcggagcgttacgcggtggagtttccccgcagtgaccatcaacggctccatgacgtactggcgcagcacaagggcttcgccatggtgtcctataacaactgcgactatattcgcaggctctacgaggactttttcatttatgaagtggagcgtcccaacagccaatccaagaagaaaaatgacatataccgggaatacatcatgaccaactatgacccccgtgtttttgcatcgcagatgacgatattcggcgattacagcagcgatgggaagatatgccgactggtgcatatcccggaacgacctttgagaacttgaggaggatctatcatgaagaacgaaatgacactggacaagaccggcctgaccatccccggcagtgagttggcagaatgcggcatggcgggcgtagatctgtctgcccagatgacgcacagccttctgctgcttatgcctcgtgagatgacagcggtacagacggcagacgcactggccggactgtttgacgcggcatcgcagcttgtgtctgccctgctggacgcctgtcgtatgccctgctgcaaggactgcgattcggacgtgagggaatttgacctcgatgccgtgcctgcgccgatccggaagctgctgctggatagcggctgctgcccgtccctgctggaatgctatctggaggagggagatgtggtctatgctgccgaatgaggcaatgtacccctacacggcgaaggaggcaagggacaggggcgaactggagctgtggcgtgccaattttcgcaccaactgtgcctgtgccggggcgatagagcttgcgatccatcgggactttgacggaatgtatctcaaggacggctgcgccaaaagcgtcattgaccagtacggctataggcgtgtagggtatgtgctggccaacaccttgcagctgcacgcctatgacggacgctaccacgaaacgaacaagagatggagcagcgccatctttatacctgaagacggcggacaccgccataccttcctcattggcagccatcccgctgtgctggacggcttcgccagtgactaccgagcggagctggcaaggctgcggcagaaccaggacgcatccactatgggcgaaatgacgatgtgaaggaggaagctatgagatatgtgaaacgtgcagtgctggtctgcggtgcggcgacgctgctctgctggttgttttccgtggcggcctacgccaccggcaggggcgatgttgccggagccgtggagagtacatgggcggcggcatcagggcagatcaagaccgttgtcaacaatgtggtatttcctgccattgatatgatcctcgccattttcttctttgtgaagctgggtacttcgtacttcgactaccgaaagacgggccagtttgaatggacggcaccggccattctgtttgcctgcctggtgttcacgctgacggcgccgctgtacatctgggacatcgtgggtgtgtgaccgcgatgtctgaacatttttcggttggctttttgcagaaagcgtggtagaataacatggaaatgactgagaaaagaggtggcacgatgcagtatacgctgatgcacaagaacatcgcagtcctcgatatggagctggatgaggtgacaagttctatccagcggatcgacgcggtgtatcgttcggagcatcttcctgtggcaacagcctcaaggcgggacggtgtggatcgtgccgcgctcaatgcatggtggatcgaccgctgcattcccgccagccgttccggtgtgcgaaaggcactggaaacactgaatctgcccaatacgcaggtgttgctgacacgctgctttggcctgagcctctcagaccagtactgggtcaggccctggggcagcgacctccagtgggagcgtatcaactttttcgaaaatcccttctcagaggatatcggtgatgtcctgctgggcaaggccacagacgcggcgaatttcgatttcagctcccctgacaacacgtcggatggctatctgaagaagcgatggaagatcatcgacgggaagcggtgtcttctgaaagcaggaagcaatccctttatgcagcagccgttcaacgaggtgatcgcatcgctggtggcggagagactgggcattccccacgtcccctatacactgctctgggatgatgacacgccctacagtgtctgtgaggatttcgttacgccggacacggagcttgtcagcgcgtggcgcgtgatgcagtccgtgaaaaaggacaacaacacatcggtctaccgccactatctgaactgctgcgaggcgttgggtgtggagggtatggaacacgcggtggatcagatgatcgtgctggactaccttatcgccaacgaggacaggcatcagaacaacttcggactactccgcagtgcagatacactggaatggttgggcgccgcacctatcttcgatagcggctcctccttggggtacgataagctgacaccccagatcctctccgcccgtgccattgagtgtaaaccattcaaaaaaacgcaccatgaacagctcaagctggtgacctctttcggctggatcgactttgataggctgaggggcgttgagcaggatatccgggacatcttggatcaggccggtgagtatgtggacgagagccgtaaggctgcgatcatctctgcattttcctcccggcttggacagctgatggtcttggcgaaggtgcagcggcaggaggatgacgtggcacaggatgtggaacaggacagggcgcaggattacggctttaagatggaactgtgacctgcaacataatacgataacaggaagcactctgctgacggcagagtgcttcctgcgtttatggaggtgagagcttatttttatttgggactttgtagccgatacggtgctgggtcagatcgtggactggttctacggtcagatcgtgggctttctcggcaatttcttttcggagatgggaaacatgggcgccgagctctttgccatgagctgggtacagagcgtggtattgtttttctcctatctgggctgggcgctgtttgccatagggctggtggtagcctgcttcgagtgcggcgtggaatattccggtggccgcggtaatgtcaaggaaacggctttgaatgccatgaaaggttttctggcggtctccctttttacacaggtaccggtgcgtttgtatgagctggcggtatcgctgcaggccgacctgacggcaggcatcaccggctttgggacgaccagcatcggggatgcggcgaaagcggcgctggaggatttcaacgccgtggagagcctgacatcttccggacaaatcattttgcggggctttggcccggtaaccagcggacttatggtcatcttctgccttgcgctgatggcctacgcggtcattaaggtcttcttcgccaaccttaagcgcggcggtattttactcattcagatcgcggtgggcagtctgtatatgttctctgtaccgcgcggctatggcgacggattcatacagtggtgtaagcaggtcgtgggtctgtgtctcacggcttttttgcaggccaccatccttgtagctggcttgatggtgtttaaggatcacgcgctgctgggcctgggacttatgctctctgccggagagatcccccgtatcgccggtgcgttcgggctggataccaccacgcgggccaatatctcctcggctgtctacacggcacagagcgcggtcagtatggcgcggacggtggtggccgcggcgaaatgagagttatcaccatgggaagtcttttcgatggaataggaggcttcccgctggcggccatccataacggcgttgtgcccctgtgggccagcgagatcgaggctttccccatccgcgttacagcggaacgactgccggggatgctgcactatggggatatcacgaagctgcgcggggacgagctgccgcccgtggacattatctgcggcggcagcccctgtcag

(The sequence listing continues in the following parts.)
